(19) United States
(12) Patent Application Publication
(10) Pub. No.: US 2009/0123452 A1
(43) Pub. Date: May 14, 2009

(54) Protease screening methods and proteases identified thereby

(76) Inventor: Edwin L. Madison, San Francisco, CA (US)

Correspondence Address: K&L Gates LLP, 3580 Carmel Mountain Road, Suite 200, San Diego, CA, 92130, US

(21) Appl. No.: 11/825,627

(22) Filed: Jul. 5, 2007

Related U.S. Application Data
(60) Provisional application No. 60/818,804, filed on Jul. 5, 2006.
(60) Provisional application No. 60/818,910, filed on Jul. 5, 2006.

(51) Int. Cl. A61K 38/48; C40B 20/04; C40B 30/04; C40B 20/06; C40B 40/10; C12N 15/63; C07K 14/00; A61P 9/00; A61P 25/00; A61P 7/02; C12N 1/00; C07H 21/00; C12N 9/48; C12N 9/72; A61K 38/49

(52) U.S. Cl. 424/94.64; 506/4; 506/9; 506/5; 506/18; 435/212; 435/215; 424/94.63; 536/23.2; 435/320.1; 435/243; 530/350

(57) ABSTRACT

Methods for identifying modified proteases with modified substrate specificity or other properties are provided. The methods screen candidate and modified proteases by contacting them with a substrate, such as a serpin, an alpha macroglobulins or a p35 family protein or modified serpins and modified p35 family members or modified alpha macroglobulins, that, upon cleavage of the substrate, traps the protease by forming a stable complex. Also provided are modified proteases.

### RELATED APPLICATIONS

[0001] Benefit of priority is claimed to U.S. Provisional Application Ser. No. 60/818,804, to Edwin Madison, entitled “Protease Screening Methods and Proteases Identified Thereby,” filed Jul. 5, 2006, and to U.S. Provisional Application Ser. No. 60/818,910, to Edwin Madison, entitled “Modified Urinary-Plasminogen Activator (u-PA) Proteases,” filed Jul. 5, 2006. The subject matter of the above-noted applications are incorporated by reference in its entirety.

[0002] This application is related to International Application No. (Attorney Dkt. No. 19049-002W01/4902PC) to Edwin Madison, entitled “Protease Screening Methods and Proteases Identified Thereby,” filed Jul. 5, 2007, which also claims priority to U.S. Provisional Application Ser. No. 60/818,804 and to U.S. Provisional Application Ser. No. 60/818,910.

[0003] This application also is related to U.S. application Ser. No. 10/677,977, filed Oct. 2, 2003 and published as U.S. Application No. US-2004-0146938 on Jul. 29, 2004, entitled “Methods of Generating and Screening for Proteases with Altered Specificity” to J Nguyen, C Thanos, S Waugh-Ruggles, and C Craik, and to corresponding published International PCT Application No. WO2004/031733, published Apr. 15, 2004, which claim benefit to U.S. Provisional Application Ser. No. 60/415,388 filed Oct. 2, 2002.

[0004] This application also is related to U.S. application Ser. No. 11/104,110, filed Apr. 2, 2005 and published as U.S. Application No. US-2006-0002916 on Jan. 5, 2006, entitled “Cleavage of VEGF and VEGF Receptor by Wild-Type and Mutant MTSP-1” to J Nguyen and S Waugh-Ruggles, and to corresponding published International PCT Application No. WO2005/110453, published Nov. 24, 2005, which claim benefit to U.S. Provisional Application Ser. No. 60/561,720 filed Apr. 12, 2004.

[0005] This application also is related to U.S. application Ser. No. 11/104,111, filed Apr. 12, 2005 and published as U.S. Application No. US-2006-0024289 on Feb. 2, 2006, entitled “Cleavage of VEGF and VEGF Receptor by Wild-Type and Mutant Proteases” to J Nguyen and S Waugh-Ruggles, and to corresponding published International PCT Application No. WO2005/100556, published Oct. 27, 2005, which claim benefit to U.S. Provisional Application Ser. No. 60/561,671 filed Apr. 12, 2004.

[0006] This application also is related to U.S. Provisional Application Ser. No. 60/729,817 filed Oct. 21, 2005, entitled “Modified Proteases that Inhibit Complement Activation” to Edwin L. Madison. This application also is related to U.S. application Ser. No. 11/584,776 filed Oct. 20, 2006, entitled “Modified Proteases that Inhibit Complement Activation” to Edwin L. Madison, Jack Nguyen, Sandra Waugh Ruggles and Christopher Thanos, and to corresponding published International PCT Application No. WO2007/047995, published Apr. 26, 2007, which each claim benefit to U.S. Provisional Application No. 60/729,817.

[0007] The subject matter of each of the above-noted related applications is incorporated by reference in its entirety.

### INCORPORATION BY REFERENCE OF SEQUENCE LISTING PROVIDED ON COMPACT DISCS

[0008] An electronic version on compact disc (CD-R) of the Sequence Listing is filed herewith in duplicate (labeled Copy # 1 and Copy # 2), the contents of which are incorporated by reference in their entirety. The computer-readable file on each of the aforementioned compact discs, created on Jul. 5, 2007, is identical, 1,809 kilobytes in size, and titled 4902SEQ.001.txt.

### FIELD OF THE INVENTION

[0009] Methods for identifying modified proteases with modified substrate specificity or other properties are provided. The methods screen candidate and modified proteases by contacting them with a substrate that traps them upon cleavage of the substrate.

### BACKGROUND

[0010] Proteases are protein-degrading enzymes. Because proteases can specifically interact with and inactivate or activate a target protein, they have been employed as therapeutics. Naturally-occurring proteases often are not optimal therapeutics since they do not exhibit the specificity, stability and/or catalytic activity that renders them suitable as biotherapeutics (see, e.g., Fernandez-Gacio et al. (2003) Trends in Biotech. 21: 408-414). Among properties of therapeutics that are important are lack of immunogenicity or reduced immunogenicity; specificity for a target molecule, and limited side-effects. Naturally-occurring proteases generally are deficient in one or more of these properties.

[0011] Attempts have been made to engineer proteases with improved properties. Among these approaches include 1) rational design, which requires information about the structure, catalytic mechanisms, and molecular modeling of a protease; and 2) directed evolution, which is a process that involves the generation of a diverse mutant repertoire for a protease, and selection of those mutants that exhibit a desired characteristic (Bertschinger et al. (2005) in Phage display in Biotech. and Drug Discovery (Sidhu s, ed), pp. 461-491). For the former approach, a lack of information regarding the structure-function relationship of proteases limits the ability to rationally design mutations for most proteases. Directed evolution methodologies have been employed with limited success.

[0012] Screening for improved protease activity often leads to a loss of substrate selectivity and vice versa. An optimal therapeutic protease should exhibit a high specificity for a target substrate and a high catalytic efficiency. Because of the limited effectiveness of available methods to select for proteases with optimized specificity and optimized activity, there remains a need to develop alternate methods of protease selection. Accordingly, it is among the objects herein to provide methods for selection of proteases or mutant proteases with desired substrate specificities and activities.

### SUMMARY

[0013] Provided are methods for selection or identification of proteases or mutant proteases or catalytically active portions thereof with desired or predetermined substrate specificities and activities. In particular, provided herein are protease screening methods that identify proteases that have an altered, improved, or optimized or otherwise altered substrate specificity and/or activity for a target substrate or substrates. The methods can be used, for example, to screen for proteases that have an altered substrate specificity and/or activity for a target substrate involved in the etiology of a disease or disorder. By virtue of the altered, typically increased, specificity and/or activity for a target substrate, the proteases identified or selected in the methods provided herein are candidates for use as reagents or therapeutics in the treatment of diseases or conditions for which the target substrate is involved. In practicing the methods provided herein, a collection of proteases or catalytically active portion thereof is contacted with a protease trap polypeptide resulting in the formation of stable complexes of the protease trap polypeptide with proteases or catalytically active portion thereof in the collection. In some examples, the protease trap polypeptide is modified to be cleaved by a protease having a predetermined substrate specificity and/or activity for a target substrate, for example, a target substrate involved in a disease or disorder. The method can further comprise screening the complexes for substrate specificity for the cleavage sequence of the target substrate. In such examples, the identified or selected protease has an altered activity and/or specificity towards the target substrate. In one example, the stable complex is formed by covalent linkage of a selected protease with a protease trap polypeptide. The selected proteases or catalytically active portion thereof are identified or selected from the complex in the methods provided herein. The methods provided herein can further include the step of separating the complexed proteases from the uncomplexed protease members of the collection. In one example, the protease trap polypeptide is labeled for detection or separation and separation is effected by capture of complexes containing the detectable protease trap polypeptide and the protease or catalytically active portion thereof. Capture can be effected in suspension, solution or on a solid support. In instances where capture is by a solid support, the protease trap polypeptide is attached to the solid support, which can be effected before, during or subsequent to contact of the protease trap polypeptide with the collection of proteases or catalytically active portions thereof. The solid support can include, for example, a well of a 96-well plate. In some examples, the protease trap polypeptide is labeled with biotin. In other examples, the protease trap polypeptide can be labeled with a His tag and separation can be effected by capture with a metal chelating agent such as, but not limited to, nickel sulphate (NiSO₄), cobalt chloride (CoCl₂), copper sulphate (CuSO₄) and zinc chloride (ZnCl₂). The metal chelating agent can be conjugated to a solid support, such as for example, on beads such as sepharose beads or magnetic beads.

[0014] In the methods provided herein, the method can further include a step of amplifying the protease or catalytically active portion thereof in the separated complexes. In some examples, the protease or catalytically active portion thereof in the separated complex is displayed on a phage, and amplification is effected by infecting a host cell with the phage. The host cells can include a bacteria, for example, E. coli. The amplified protease, either from bacterial cell medium, bacterial periplasm, phage supernatant or purified protein, can be screened for specificity and/or activity towards a target substrate. Typically, the target substrate is a polypeptide or cleavage sequence in a polypeptide involved in the etiology of a disease or disorder.

[0015] Also provided herein is a multiplexing method whereby the collection of proteases are contacted with a plurality of different protease trap polypeptides, including modified forms thereof, where each of the protease trap polypeptides are labeled such that they can be identifiably detected. In such methods, at least two protease trap polypeptides are identifiable labeled such that more than one stable complex can form and more than one protease is identified.

[0016] In the methods provided herein, the methods also include successive rounds of screening to optimize protease selection where proteases are amplified following their identification or selection in a first round of the screening methods herein, to thereby produce a second collection of proteases or catalytically active portions thereof. The second collection of proteases are contacted with a protease trap polypeptide, that is the same or different than the first protease trap polypeptide, to produce a second set of stable complexes. The proteases in the second set of stable complexes are identified or selected.

[0017] In the methods provided herein, the protease trap polypeptide is a serpin, a member of the alpha macroglobulin family, or a member of the p35 family. Such a polypeptide molecule used in the methods provided herein forms a stable complex by covalent linkage of a protease or catalytically active portion thereof with the protease trap polypeptide.

[0018] In one aspect of the method provided herein, proteases are identified that have a desired substrate specificity by contacting a collection of protease and/or proteolytically active portions of proteases with a protease trap polypeptide to form stable complexes of the protease trap polypeptide with a protease upon cleavage of the protease trap polypeptide. The protease trap polypeptide, or modified form thereof, is selected for use in the methods for purposes of being cleaved by a protease having the desired substrate specificity. In the methods, the protease or proteolytically active portion thereof is identified to select for a protease having a desired substrate specificity.

[0019] The collection of proteases used in the methods provided herein are any collection of proteases or catalytically active portions thereof and include members with at least, about, or equal to 5, 10, 50, 100, 10³, 10⁴, 10⁵, 10⁶ or more different members. In some aspects, the proteases are serine and/or cysteine proteases. In the methods provided herein, the collection of proteases or catalytically active portions thereof are displayed for contact with a protease trap polypeptide. In one example, the protease or proteolytically active portion thereof are displayed on a solid support, cell surface, or on a surface of a microorganism. The protease can be displayed on yeast, bacterium, a virus, a phage, a nucleic acid, an mRNA molecule, or on ribosomes. Where the protease or proteolytically active portion thereof is displayed on a microorganism the microorganism includes, but is not limited to, E. coli, S. cerevisiae, or a virus such as an M13, fd, or T7 phage, or a baculovirus. In the methods provided herein, the proteases or proteolytically active portions thereof are displayed on a phage display library and the protease collection is a protease phage display library. In some embodiments, the proteases are provided in the collections, such as by display, as proteolytically active portions of a full-length protease. In some examples, contact of a protease collection with a protease trap polypeptide is in a homogenous mixture.

[0020] Provided herein is a method of protease selection where at least two different protease trap polypeptides are contacted with the collection, but where only one of the protease trap polypeptides is detectably labeled. The protease trap polypeptide that is detectably labeled permits the capture of stable complexes containing the detectable protease trap polypeptide and a protease or catalytically active portion thereof. In some examples of this method, the one or more other protease trap polypeptides that are not detectably labeled are present in excess in the reaction compared to the detectably labeled protease trap polypeptide. In the methods, the label is any label for detection thereof, such as a fluorescent label or an epitope label such as a His tag. In other examples, the detectable label is biotin.

[0021] The collection of proteases for which selection is made in the methods provided herein include any collection of proteases. In some examples, the proteases are serine or cysteine proteases. The collection of proteases include those that are members of the chymotrypsin and subtilisin family of serine proteases or from the caspases of the papain family of cysteine proteases. The proteases include any proteases, or catalytically active portion thereof, set forth in Table 7. In some examples, the protease or catalytically active portion thereof are collections of urokinase plasminogen activator (u-PA) proteases, tissue plasminogen activator (t-PA) proteases, or MT-SP1 proteases.

[0022] In one aspect, the protease trap polypeptides used in the methods provided herein are serpins, p35 family members, alpha-macroglobulin family members, or any modified forms thereof. A protease trap polypeptide used in the methods provided herein include, but is not limited to, plasminogen inhibitor-1 (PAI-1), antithrombin (AT3), or alpha 2-macroglobulin, or modified forms thereof. Modified forms of a protease trap polypeptide used in the methods provided herein included those containing amino acid replacement, deletions, or substitutions in the reactive site of the protease trap polypeptide. In some examples, the modification is any one or more amino acid replacements corresponding to a cleavage sequence of a target substrate. The target substrate can be any protein involved in an etiology of a disease or disorder. Examples of target substrates include, but are not limited to, a VEGFR, a t-PA cleavage sequence, or a complement protein. For example, target substrates include, but are not limited to, VEGFR2 or complement protein C2. The cleavage sequence of a target substrate includes, but is not limited to, any set forth in any of SEQ ID NOS: 389, 479 and 498. In some aspects, the protease trap polypeptide is a serpin and the one or more amino acid replacements is/are in the reactive site loop of the serpin polypeptide. The one or more replacements in the reactive site loop (RSL) include those in any one or more of the P4-P2′ positions. Exemplary of such serpins used in the methods provided herein are any set forth in any of SEQ ID NOS: 497, 499, 610 and 611. In another example, the protease trap polypeptide is an alpha 2 macroglobulin and the one or more amino acid replacements are in the bait region of the polypeptide. The proteases identified or selected in the methods herein against a modified protease trap polypeptide can be screened or selected for altered substrate specificity for the target substrate as compared to a non-target substrate. In such examples, the non-target substrate includes a substrate of the corresponding template protease. Typically, the substrate specificity of the identified or selected protease is increased by 1.5-fold, 2-fold, 5-fold, 10-fold, 50-fold, 100-fold, 200-fold, 300-fold, 400-fold, 500-fold or more.

[0023] The methods provided herein include those that are iterative where the method of identifying and/or selecting for proteases with a desired substrate specificity is repeated or performed a plurality of times. In such methods, a plurality of different proteases can be identified in the first iteration, or the first round, of the method. In other examples, a plurality of proteases are generated and prepared after the first iteration based on the identified proteases selected in the first round of iteration. Additionally, in some examples, the amino acid sequences of selected proteases identified in the first round or iteration and/or in successive rounds are compared to identify hot spots. Hot spots are those positions that are recognized as a modified locus in multiple rounds, such as occur in at least 2, 3, 4, 5 or more identified proteases, such as compared to a wild-type or template protease, from a collection of modified proteases used in the method.

[0024] Also provided in the method herein is a further step of, after identifying a protease or proteases, preparing a second collection of proteases, where an identified protease is used a template to make further mutations in the protease sequence or catalytically active portion thereof such that members of the second collection (are based on) contain polypeptides having mutations of the identified proteases and additional mutations; then contacting the second collection with a protease trap polypeptide that is either identical or different from the protease trap used to isolate the first protease or proteases, where the protease trap is modified to be cleaved by a protease having the desired substrate specificity; and identifying a protease(s) or proteolytically active portion(s) of a protease from the collection in a complex, whereby the identified protease(s) has greater activity or specificity towards the desired substrate than the first identified protease. The second collection can contain random or focused mutations compared to the sequence of amino acids of the identified template protease(s) or proteolytically active portion of a protease. Focused mutations, include, for example, hot spot positions, such as positions 30, 73, 89 and 155, based on chymotrypsin numbering, in a serine protease, such as u-PA.

[0025] In practicing the methods, the reaction for forming stable complexes can be modulated by controlling one or more parameters. Such parameters are any that alter the rate or extent of reaction or efficiency of the reaction, such as, but are not limited to, reaction time, temperature, pH, ionic strength, library concentration and protease trap polypeptide concentration.

[0026] The reactions can be performed in the presence of a competitor of the reaction between a protease trap polypeptide and a protease or proteolytically active portion thereof to thereby enhance selectivity of identified protease(s) or proteolytically active portion(s). Competitors include, for example, serum or plasma. Such as human serum or human plasma, a cell or tissue extract, a biological fluid, such as urine or blood, a purified or partially purified wild type form (or other modified form) of the protease trap. Exemplary of such competitors is a purified or partially purified wild-type form of a protease trap polypeptide or one or more specific variants of a protease trap polypeptide.

[0027] Iterative methods for evolving or selecting or identifying a protease or proteolytically active portion thereof with specificity/selectivity and/or activity for at least two cleavage sequences are provided. The methods include the steps of: a) contacting a collection of proteases and/or proteolytically active portions of proteases with a first protease trap polypeptide to form, upon cleavage of the protease trap polypeptide by the protease or proteolytically active portion thereof, stable complexes containing the protease trap polypeptide with a protease or catalytically active portion thereof in the collection, wherein contacting is effected in the presence of a competitor; b) identifying or selecting proteases or proteolytically active portions thereof that form complexes with the first protease trap polypeptide; c) contacting proteases or proteolytically active portion thereof that form complexes with the first protease trap polypeptide with a second protease trap polypeptide in the presence of a competitor; and d) identifying or selecting proteases or proteolytically active portions thereof that form complexes with the first protease trap polypeptide. The two cleavage sequences can be in one target substrate or can be in two different target substrates. The identified, selected or evolved protease or proteolytically active portion thereof has substrate specificity and/or cleavage activity for at least two different cleavage sequences in one or two different target substrates. The first and second protease trap polypeptide can be the same or different. Typically, the first and second protease trap polypeptide used in the method are different and each are modified to be cleaved by a protease having the predetermined substrate specificity for different target substrates. The method can further include repeating steps a) and b) or a)-d) at least once more until a protease with a desired or predetermined substrate specificity and cleavage activity to at least two recognition sequences is isolated. Substrate specificity and cleavage activity typically are increased compared with a template protease.

[0028] Competitors for use in the methods include anything with which the protease trap polypeptide can interact, typically with lesser stability than a target protease. Competitors include, but are not limited to, serum, plasma, human serum or human plasma, a cell or tissue extract, a biological fluid such as urine or blood, a purified or partially purified wild-type form of the protease trap, and one or more specific variants of a protease trap polypeptide.

[0029] Also provided are methods of protease selection that include the steps of: a) contacting a collection of proteases or proteolytically active portions thereof with a first protease trap polypeptide to form, upon cleavage of the protease trap polypeptide, covalent complexes of the protease trap polypeptide with any protease or catalytically active portion thereof in the collection; b) separating the complexed proteases from uncomplexed protease trap polypeptide(s); c) isolating or selecting or identifying the complexed proteases; d) generating a second collection of proteases or proteolytically active portions of proteases based on the selected proteases; and e) repeating steps a)-c) by contacting the second collection of proteases or proteolytically active portions thereof with a second protease trap polypeptide that is different from the first protease trap polypeptide to form complexes; separating the complexes; and isolating, selecting or identifying complexed proteases. The first and second protease trap polypeptides can be modified to contain two different target substrate recognition sequences, whereby the identified or selected protease has specificity and high cleavage activity to at least two recognition sequences. These methods can be repeated a plurality of times. In these methods, the collection of proteases or proteolytically active portions thereof can be contacted with the first and/or second protease trap polypeptide in the presence of a competitor (see above).

[0030] In any of the methods of protease selection provided herein, the collections can contain modified proteases. The modifications in the proteases can be random or focused or in a target region of the polypeptide.

[0031] Also provided are combinations that contain a collection of proteases and/or proteolytically active portions thereof; and at least one protease trap polypeptide. The components can be provided separately or as a mixture. The protease trap polypeptide include, among serpins, p35 family members, alpha-macroglobulin family members, modified forms of each, and mixtures thereof.

[0032] The collection of proteases and/or catalytically active portions thereof can be provided in solution or suspension or in a solid phase or otherwise displayed, such as on a solid support (matrix material) or in a display library, such as, but not limited to, a phage display library, where members display at least a proteolytically active portion of a protease.

[0033] Kits containing the combinations are provided. Typically the kits contain the packaged components and, optionally, additional reagents and instructions for performing the methods.

[0034] Also provided are methods for modifying the substrate specificity of a serine protease, such as u-PA, by modifying one or more of residues selected from 30, 73, 89 and 155 based on chymotrypsin numbering.

[0035] Also provided are modified proteases identified by the methods herein. The modified proteases provided herein exhibit altered substrate specificity and/or activity by virtue of the identified modification. Any of the modifications provided herein identified using the selection method can be made in a wild-type protease, any allelic or species variant thereof, or in any other variant of the protease. In addition, also provided herein are modified proteases containing 80%, 85%, 90%, 91%, 92%, 93%, 94%, 95%, 96%, 97%, 98%, 99% or more sequence identity to a wild-type protease, or allelic or species variant thereof, so long as the modification identified in the methods herein is present.

[0036] Among such proteases are modified proteases, including modified serine proteases in the chymotrypsin family, such as urinary plasminogen activator (u-PA) polypeptides, or catalytically active fragments thereof containing one or more mutations in hot spot positions selected from among positions 30, 73, 89, and 155, based on chymotrypsin numbering, whereby substrate specificity is altered.

[0037] Provided herein also include modified urinary plasminogen activator (u-PA) proteases identified in the method herein that exhibit increased specificity and/or activity towards a target substrate involved in the etiology of a disease or disorder. Such target substrates include, but are not limited to, a VEGFR or a tissue plasminogen activator (t-PA) substrate. Hence, also provided are modified serine proteases or catalytically active portions thereof that cleave a t-PA substrate. In particular, among such proteases are modified urinary plasminogen activator (u-PA) polypeptides in which the u-PA polypeptide or catalytically active portion thereof contains one or more modifications in positions selected from among positions 21, 24, 30, 39, 61(A), 80, 82, 84, 89, 92, 156, 158, 159, and 187, based on chymotrypsin numbering. Also provided are such modified u-PA polypeptides or catalytically active portions thereof containing one or more mutations selected from among F21V, I24L, F30V, F30L, T39A, Y61(A)H, E80G, E82E, E84K, I89V, K92E, K156T, T158A, V159A, and K187E. Also provided are these modified u-PA polypeptides where the u-PA polypeptide or catalytically active portions thereof contain two or more mutations selected from among F30V/Y61(a)H; F30V/K82E; F30V/K156T; F30V/K82E/V159A; F30V/K82E/T39A/V159A; F30V/K82E/T158A/V159A; F30V/Y61 (a)H/K92E; F30V/K82E/V159A/E80G/I89V/K187E; and F30V/K82E/V159A/E80G/E84K/I89V\K187E.

[0038] Also provided are modified serine proteases or catalytically active portions thereof that cleave VEGFR, particularly VEGFR-2. In particular, provided are modified urinary plasminogen activator (u-PA) polypeptides and catalytically active portions thereof, wherein the u-PA polypeptide or catalytically active portion thereof contains one or more modifications in positions selected from among positions 38, 72, 73, 75, 132, 133, 137, 138, 155, 160, and 217, based on chymotrypsin numbering, whereby substrate specificity to a VEGFR-2, or sequence thereof, is altered. Also provided are such polypeptides that contain one or more mutations selected from among V38D, R72G, L73A, L73P, S75P, F132L, G133D, E137G, I138T, L155P, L155V, L155M, V160A, and R217C. These polypeptides can further include a modification at position 30 and/or position 89, based on chymotrypsin numbering, such as modifications selected from among F30I, F30T, F30L, F30V, F30G, F30M, and I89V. Also provided are these u-PA polypeptides or catalytically active portions thereof that contain one or more mutations, and in some instances two or more mutations selected from among L73A/I89V; L73P; R217C; L155P; S75P/I89V/I138T; E137G; R72G/L155P; G133D; V160A; V38D; F132L/V160A; L73A/I89V/F30T; L73A/I89V/F30L; L73A/I89V/F30V; L73A/I89V/F30G; L73A/I89V/L 155V; L73A/I89V/F30M; L73A/I89V/L 155M; L73A/I89V/F30L/L155M; and L73A/I89V/F30G/L155M.

[0039] Also provided are modified u-PA polypeptide, wherein the u-PA polypeptide or catalytically active portion thereof contains one or more mutations selected from among F301, F30T, F30G, and F30M.

[0040] Also provided herein are modified MT-SP 1 polypeptides identified by the methods herein. Such modified polypeptides include any having one or more amino acid modifications selected from among D23E, I41F, I41T, L52M, Y60(g)ₛ, T56K, H71R, F93L, N95K, F97Y, F97L, T98P, F99L, A126T, V129D, P131S, I136T, I136V, H143R, T144I, I154V, N164D, T166A, L171F, P173S, F184(a)L, Q192H, S201I, Q209L, Q221(a)L, R230W, F234L, and V244G, based on chymotrypsin numbering, in an MT-SP1 polypeptide set forth in SEQ ID NO:253. In some examples, the modifications are in a catalytically active portion of an MT-SP1 having a sequence of amino acids set forth in SEQ ID NO:505. In other examples, the modifications are in an MT-SP 1 polypeptide further comprising a modification corresponding to modification of C122S in an MT-SP 1 polypeptide set forth in SEQ ID NO:253, based on chymotrypsin numberiner, for example, an MT-SP1 set forth in SEQ ID NO: 507 or 517. In particular of modifications provided herein are any selected from among I41F, F97Y, L171F and V244G. The modified MT-SP1 polypeptides provided herein can further include one or more modifications corresponding to Q175R or D217V in an MT-SP1 polypeptide set forth in SEQ ID NO:253. Such modifications include any selected from among I136T/N164D/T166A/F184(A)L/D217V; I41F; I41F/A126T/V244G; D23E/I41F/T98P/T144I; I41F/L171F/V244G; H143R/Q175R; I41F/L171F; R230W; I41F/I154V/V244G; I41F/L52M/V129D/Q221(A)L; F99L; F97Y/I136V/Q192H/S2011; H71R/P131S/D217V; D217V; T65K/F93L/F97Y/D217V; I41T/P173S/Q209L; F97L/F234L; Q175R; N95K; and Y60(G)S. Any of the above modified MT-SP1 polypeptides exhibit modifications that increase one or both of specificity for a C2 complement protein or activity towards C2 complement protein.

[0041] Also provided are pharmaceutical compositions containing the modified proteases, including modified serine proteases, such as the modified u-PA polypeptides or modified MT-SP1 polypeptides. The pharmaceutical compositions contain pharmaceutically acceptable excipients, and can be formulated for any suitable route of administration, including, but not limited to, systemic, oral, nasal, pulmonary, local and topical administration. Also provided are kits containing any of the pharmaceutical compositions, a device for administration of the composition and, optionally, instructions for administration.

[0042] Nucleic acid molecules encoding the modified proteases, including the u-PA proteases and MT-SP 1 proteases and catalytically active portions thereof are provided. Also provided are vectors containing the nucleic acid molecules and cells containing the nucleic acid molecules or vectors.

[0043] Methods of treatment of subjects having a disease or condition, such as, but not limited to, a disease or condition selected from among arterial thrombosis, venous thrombosis and thromboembolism, ischemic stroke, acquired coagulation disorders, disseminated intravascular coagulation, bacterial infection and periodontitis, and neurological conditions, that is treated by administration of t-PA, by administering the pharmaceutical compositions containing the modified u-PA proteases or proteolytically active portions thereof or encoding nucleic acid molecules or the cells are provided. The methods are effected by administering a nucleic acid molecule, a cell or a pharmaceutical composition to the subject.

[0044] Also provided are methods of treating a subject having a disease or condition that is mediated by a VEGFR, particularly a VEGFR-2. Such diseases and conditions include, but are not limited to, cancer, angiogenic diseases, ophthalmic diseases, such as macular degeneration, inflammatory diseases, and diabetes, particularly complications therefrom, such as diabetic retinopathies. The methods are effected by administering a nucleic acid molecule or cell or composition containing or encoding the modified u-PA proteases that exhibit substrate specificity, particularly increased compared to the unmodified form, for VEGFR-2. The methods optionally include administering another agent for treatment of the disease or condition, such as administering an anti-tumor agent where the disease is cancer.

[0045] Also provided are methods of treating a subject having a disease or condition that is mediated by a complement protein, particularly C2. Such diseases and conditions include, but are not limited to sepsis, Rheumatoid arthritis (RA), membranoproliferative glomerulonephritis (MPGN), Multiple Sclerosis (MS), Myasthenia gravis (MG), asthma, inflammatory bowel disease, immune complex (IC)-mediated acute inflammatory tissue injury, Alzheimer's Disease (AD), Ischemia-reperfusion injury, and Guillan-Barre syndrome. In some examples, the ischemia-reperfusion injury is caused by an event or treatment, such as, but not limited to, myocardial infarct (MI), stroke, angioplasty, coronary artery bypass graft, cardiopulmonary bypass (CPB), and hemodialysis. The methods are effected by administering a nucleic acid molecule or cell or composition containing or encoding the modified MT-SP1 proteases that exhibit substrate specificity, particularly increased compared to the unmodified form, for C2. In other examples, the disease or conditions results from treatment of a subject. For example, the treatment can result in complement-mediated ischemia-reperfusion injury. Such treatments include, but are not limited to, angioplasty or coronary artery bypass graft. In such examples, a modified MT-SP1 protease is administered prior to treatment of a subject. The modified MT-SP1 polypeptides can be administered by contacting a body fluid or tissue sample in vitro, ex vivo or in vivo.

[0046] Also provided herein are modified serpin polypeptides used in the methods provided herein. Such modified serpin polypeptides are modified in its reactive site loop at positions corresponding to positions P4-P2′ with a cleavage sequence for a target substrate. Typically, the target substrate is involved in the etiology of a disease or disorder. Such target substrates include, but are not limited to, a VEGFR, a complement protein or a t-PA substrates. For example, target substrates include VEGFR2 and complement protein C2. Exemplary of modified serpins provided herein are modified plasminogen-activator inhibitor-1 (PAI-1) and antithrombin-3 (AT3). Exemplary modified serpins are set forth in any of SEQ ID NOS: 497, 499, 610 and 611.

### BRIEF DESCRIPTION OF THE FIGURES

[0047] FIG. 1 depicts the mechanism of inhibition of a protease by a serpin and the generation of a stable inhibited complex. Following contact, a serpin (I) and protease (E) initially form a noncovalent, Michaelis-like complex (E1). This is followed by cleavage of the P1-P1′ scissile bond and nucleophilic attack by the catalytic serine of a protease on a reactive site loop (RSL) carbonyl of a serpin and the formation of a covalent acyl-enzyme intermediate (EI^{#}). The kinetically trapped covalent inhibitory product (EI⁺) is the result of RSL insertion, protease translocation, protease active site distortion, and deformation of the overall protease structure. The minor non-inhibitory pathway releases normal cleavage product, serpin (I*), and reactive protease (E).

### DETAILED DESCRIPTION

### Outline

[0048] A. Definitions
[0049] B. Method for Screening Proteases
[0050] C. Protease Trap Polypeptides
   [0051] 1. Serpins: Structure, Function, and Expression
   [0052] 2. Protease Catalysis, Inhibitory Mechanism of Serpins, and Formation of Acyl Enzyme Intermediate
      [0053] a. Exemplary Serpins
         [0054] i. PAI-1
         [0055] ii. Antithrombin (AT3)
   [0056] 3. Other Protease Trap Polypeptides
      [0057] a. p35
      [0058] b. Alpha Macroglobulins (aM)
   [0059] 4. Protease Trap Polypeptide Competitors
   [0060] 5. Variant Protease Trap Polypeptides
[0061] D. Proteases
   [0062] 1. Candidate Proteases
      [0063] a. Classes of Proteases
         [0064] i. Serine Proteases
            [0065] (a) Urokinase-type Plasminogen Activator (u-PA)
            [0066] (b) Tissue Plasminogen Activator (t-PA)
            [0067] (c) MT-SP1
         [0068] ii. Cysteine Proteases
[0069] E. Modified Proteases and Collections for Screening
   [0070] 1. Generation of Variant Proteases
      [0071] a. Random Mutagenesis
      [0072] b. Focused Mutagenesis
   [0073] 2. Chimeric Forms of Variant Proteases
   [0074] 3. Combinatorial Libraries and Other Libraries
      [0075] a. Phage Display Libraries
      [0076] b. Cell Surface Display Libraries
      [0077] c. Other Display Libraries
[0078] F. Methods of Contacting, Isolating, and Identifying Selected Proteases
   [0079] 1. Iterative Screening
   [0080] 2. Exemplary Selected Proteases
[0081] G. Methods of Assessing Protease Activity and Specificity
[0082] H. Methods of Producing Nucleic Acids Encoding Protease Trap Polypeptides (i.e. Serpins) or Variants Thereof or Proteases/Modified Proteases
   [0083] 1. Vectors and Cells
   [0084] 2. Expression
      [0085] a. Prokaryotic Cells
      [0086] b. Yeast Cells
      [0087] c. Insect Cells
      [0088] d. Mammalian Cells
      [0089] e. Plants
   [0090] 3. Purification Techniques
   [0091] 4. Fusion Proteins
   [0092] 5. Nucleotide Sequences
[0093] I. Preparation, Formulation and Administration of Selected Protease Polypeptides
   [0094] 1. Compositions and Delivery
   [0095] 2. In vivo Expression of Selected Proteases and Gene Therapy
      [0096] a. Delivery of Nucleic Acids
         [0097] i. Vectors—Episomal and Integrating
         [0098] ii. Artificial Chromosomes and Other Non-viral Vector Delivery Methods
         [0099] iii. Liposomes and Other Encapsulated Forms and Administration of Cells Containing Nucleic Acids
      [0100] b. In vitro and Ex vivo Delivery
      [0101] c. Systemic, Local and Topical Delivery
   [0102] 2. Combination Therapies
   [0103] 3. Articles of Manufacture and Kits
[0104] J. Exemplary Methods of Treatment with Selected Protease Polypeptides
   [0105] 1. Exemplary Methods of Treatment for Selected uPA Polypeptides That Cleave tPA Targets
      [0106] a. Thrombotic Diseases and Conditions
         [0107] i. Arterial Thrombosis
         [0108] ii. Venous Thrombosis and Thromboembolism
            [0109] (a) Ischemic stroke
         [0110] iii. Acquired Coagulation Disorders
            [0111] (a) Disseminated Intravascular Coagulation (DIC)
            [0112] (b) Bacterial Infection and Periodontitis
      [0113] b. Other tPA Target-associated Conditions
      [0114] c. Diagnostic Methods
   [0115] 2. Exemplary Methods of Treatment for Selected Protease Polypeptides That Cleave VEGF or VEGFR Targets
      [0116] a. Angiogenesis, Cancer, and Other Cell Cycle Dependent Diseases or Conditions
      [0117] b. Combination Therapies with Selected Proteases That Cleave VEGF or VEGFR
   [0118] 3. Exemplary Methods of Treatment for Selected MT-SP1 Polypeptides that cleave complement protein targets
      [0119] a. Immune-mediated Inflammatory Diseases
      [0120] b. Neurodegenerative Disease
      [0121] c. Cardiovascular Disease
[0122] K. EXAMPLES

### A. DEFINITIONS

[0123] Unless defined otherwise, all technical and scientific terms used herein have the same meaning as is commonly understood by one of skill in the art to which the invention(s) belong. All patents, patent applications, published applications and publications, Genbank sequences, databases, websites and other published materials referred to throughout the entire disclosure herein, unless noted otherwise, are incorporated by reference in their entirety. In the event that there are a plurality of definitions for terms herein, those in this section prevail. Where reference is made to a URL or other such identifier or address, it understood that such identifiers can change and particular information on the internet can come and go, but equivalent information can be found by searching the internet. Reference thereto evidences the availability and public dissemination of such information.

[0124] As used herein, a “protease trap” or “protease trap polypeptide”, refers to a substrate that is cleaved by a protease and that, upon cleavage, forms a stable complex with the protease to thereby trap the proteases as the protease goes through an actual transition state to form an enzyme complex, thereby inhibiting activity of the proteases and capturing it. Thus, protease traps are inhibitors of proteases. Protease traps are polypeptides or molecules that include amino acid residues that are cleaved by a protease such that upon cleavage a stable complex is formed. The complex is sufficiently stable to permit separation of complexes from unreacted trap or from trap that has less stable interactions with the proteases. Protease traps include any molecule, synthetic, modified or naturally-occurring that is cleaved by the protease and, upon cleavage, forms a complex with the protease to permit separation of the reacted protease or complex from unreacted trap. Exemplary of such protease traps are serpins, modified serpins, molecules that exhibit a mechanism similar to serpins, such as for example, p35, and any other molecule that is cleaved by a protease and traps the protease as a stable complex, such as for example, alpha 2 macroglobulin. Also included as protease traps are synthetic polypeptides that are cleaved by a protease (or proteolytically active portion thereof) and, upon cleavage, form a stable complex with the protease or proteolytically active portion thereof.

[0125] As used herein, serpins refer to a group of structurally related proteins that inhibit proteases following cleavage of their reactive site by a protease resulting in the formation of a stable acyl-enzyme intermediate and the trapping of the protease in a stable covalent complex. Serpins include allelic and species variants and other variants so long as the serpin molecule inhibits a protease by forming a stable covalent complex. Serpins also include truncated or contiguous fragments of amino acids of a full-length serpin polypeptide that minimally includes at least a sufficient portion of the reactive site loop (RSL) to facilitate protease inhibition and the formation of a stable covalent complex with the protease. Exemplary serpins are set forth in Table 2 and/or have a sequence of amino acids set forth in any one of SEQ ID NOS: 1-38, allelic variants, or truncated portions thereof.

[0126] As used herein a “mutant” or “variant” serpin refers to a serpin that contains amino acid modifications, particularly modifications in the reactive site loop of the serpin. The modifications can be replacement, deletion, or substitution of one or more amino acids corresponding to Pₙ-P₁₅-P₁₄-P₁₃ . . . P₄-P₃-P₂-P₁-P₁′-P₂′-P₃′ . . . Pₙ′-positions. Typically, the serpin contains amino acid replacements in 1, 2, 3, 4, 5, 6, 7, 8, 9, 10 or more amino acid positions in the reactive site loop as compared to a wild-type serpin. Most usually, the replacements are in one or more amino acids corresponding to positions P4-P2′. For example, for the exemplary PAI-1 serpin set forth in SEQ ID NO: 11, the P4-P1′ positions (VSARM) corresponding to amino acid positions 366-370 in SEQ ID NO: 11 can be modified. Example 1 describes modification of the VSARM amino acid residues to RRVRM or PFGRS.

[0127] As used herein, a “scissile bond” refers to the bond in a polypeptide cleaved by a protease and is denoted by the bond formed between the P1-P1′ position in the cleavage sequence of a substrate.

[0128] As used herein, reactive site refers to the portion of the sequence of a target substrate that is cleaved by a protease. Typically, a reactive site includes the P1-P1′ scissile bond sequence.

[0129] As used herein, reactive site loop (RSL; also called reactive center loop, RCL) refers to a sequence of amino acids in a serpin molecule (typically 17 to 22 contiguous amino acids) that serve as the protease recognition site and generally contain the sole or primary determinants of protease specificity. Cleavage of the RSL sequence and conformational changes thereof are responsible for the trapping of the protease by the serpin molecule in a stable covalent complex. For purposes herein, any one or more amino acids in the RSL loop of a serpin can be modified to correspond to cleavage sequences in a desired target protein. Such modified serpins, or portions thereof containing the variant RSL sequence, can be used to select for proteases with altered substrate specificity.

[0130] As used herein, partitioning refers to the process by which serpins partition between a stable serpin-protease complex versus cleaved serpins. The reason for partitioning in serpins pertains to the nature of the inhibitory pathway, which results from a large translocation of the cleaved reactive-site loop across the serpin surface. If the protease has time to dissociate (i.e. deacylate the enzyme-serpin complex) before adopting the inhibited location, then partitioning occurs. The outcome of a given serpin-protease interaction, therefore, depends on the partitioning ratio between the inhibitory (k₄) and substrate (k₅) pathways (such as is depicted in FIG. 1), which is represented by the stoichiometry of inhibition (SI=1+k₅/k₄); good inhibitors have the value of 1 because most of the serpin molecules partition into complex formation and k₅/k₄ is close to 0. If the RSL loop, however, is not inserted fast enough into the protease, partitioning occurs and the reaction proceeds directly to the cleaved product.

[0131] As used herein, catalytic efficiency or kcat/km is a measure of the efficiency with which a protease cleaves a substrate and is measured under steady state conditions as is well known to those skilled in the art.

[0132] As used herein, second order rate constant of inhibition refers to the rate constant for the interaction of a protease with an inhibitor. Generally the interaction of a protease with an inhibitor, such as a protease trap, such as a serpin, is a second order reaction proportional to the product of the concentration of each reactant, the inhibitor and the protease. The second order rate constant for inhibition of a protease by a tight binding or irreversible inhibitor or a protease trap is a constant, which when multiplied by the enzyme concentration and the inhibitor concentration yields the rate of enzyme inactivation by a particular inhibitor. The rate constant for each protease trap and enzyme pair uniquely reflects their interaction. As a second order reaction, an increase in the second order rate constant means that the interaction between a modified selected protease and inhibitor is faster compared to the interaction of an unmodified protease and the inhibitor. Thus, a change in the second order rate constant reflects a change in the interaction between the components, the protease and/or inhibitor, of the reaction. An increased second order rate constant when screening for proteases can reflect a desired selected modification in the protease.

[0133] As used herein, acyl enzyme intermediate refers to the covalent intermediate formed during the first step in the catalysis between a substrate and an essential serine in the catalytic center of a serine protease (typically Ser195, based on chymotrypsin numbering). The reaction proceeds as follows: the serine —OH attacks the carbonyl carbon at the P1 position of the substrate, the nitrogen of the histidine accepts the hydrogen from the —OH of the serine, and a pair of electrons from the double bond of the carbonyl oxygen moves to the oxygen. This results in the generation of a negatively charged tetrahedral intermediate. The bond joining the nitrogen and the carbon in the peptide bond of the substrate is now broken. The covalent electrons creating this bond move to attack the hydrogen of the histidine thereby breaking the connection. The electrons that previously moved from the carbonyl oxygen double bond move back from the negative oxygen to recreate the bond resulting in the formation of a covalent acyl enzyme intermediate. The acyl enzyme intermediate is hydrolyzed by water, resulting in deacylation and the formation of a cleaved substrate and free enzyme.

[0134] As used herein, a collection of proteases refers to a collection containing at least 10 different proteases and/or proteolytically active portions thereof, and generally containing at least 50, 100, 500, 1000, 10⁴, 10⁵ or more members. The collections typically contain proteases (or proteolytically active portions thereof) to be screened for substrate specificity. Included in the collections are naturally occurring proteases (or proteolytically active portions thereof) and/or modified proteases (or proteolytically active portions thereof). The modifications include random mutations along the length of the proteases and/or modifications in targeted or selected regions (i.e. focused mutations). The modifications can be combinatorial and can include all permutations, by substitution of all amino acids at a particular locus or at all loci or subsets thereof. The collections can include proteases of full length or shorter, including only the protease domain. The proteases can include any proteases, such as serine proteases and cysteine proteases. The size of the collection and particular collection is determined by the user. In other embodiments, the collection can contain as few as 2 proteases.

[0135] As used herein, “combinatorial collections” or “combinatorial libraries” refers to a collection of protease polypeptides having distinct and diverse amino acid mutations in its sequence with respect to the sequence of a starting template protease polypeptide sequence. The mutations represented in the collection can be across the sequence of the polypeptide or can be in a specified region or regions of the polypeptide sequence. The mutations can be made randomly or can be targeted mutations designed empirically or rationally based on structural or functional information.

[0136] As used herein, a “template protease” refers to a protease having a sequence of amino acids that is used for mutagenesis thereof. A template protease can be the 6 sequence of a wild-type protease, or a catalytically active portion thereof, or it can be the sequence of a variant protease, or catalytically active portion thereof, for which additional mutations are made. For example, a mutant protease identified in the selection methods herein, can be used as a starting template for further mutagenesis to be used in subsequent rounds of selection.

[0137] As used herein, random mutation refers to the introduction of one or more amino acid changes across the sequence of a polypeptide without regard or bias as to the mutation. Random mutagenesis can be facilitated by a variety of techniques known to one of skill in the art including, for example, UV irradiation, chemical methods, and PCR methods (e.g., error-prone PCR).

[0138] As used herein, a focused mutation refers to one or more amino acid changes in a specified region (or regions) or a specified position (or positions) of a polypeptide. For example, targeted mutation of the amino acids in the specificity binding pocket of a protease can be made. Focused mutagenesis can be performed, for example, by site directed mutagenesis or multi-site directed mutagenesis using standard recombinant techniques known in the art.

[0139] As used herein, a stable complex between a protease trap and a protease or a proteolytically active portion thereof refers to a complex that is sufficiently stable to be separated from proteases that did not form complexes with the protease trap (i.e. uncomplexed proteases). Such complexes can be formed via any stable interaction, including covalent, ionic and hydrophobic interactions, but are sufficiently stable under the reaction conditions to remain complexed for sufficient time to separate complexes for isolation. Typically such interactions, such as between serpins and cleaved proteases, are covalent bonds.

[0140] As used herein, a “hot spot” refers to a position that is mutated in multiple variants resulting from the protease selection that exhibit improved activity and/or selectivity for the desired new substrate sequence. One or more “hot spots” can be identified during protease selection. Hence, such positions are specificity and/or selectivity determinants for the protease and thereby contribute to substrate specificity and also can occur as broad specificity and/or selectivity determinants across the corresponding locus in more than one member of a protease family, such as a serine protease family or a particular protease family, such as based on chymotrypsin numbering.

[0141] As used herein, desired specificity with reference to substrate specificity refers to cleavage specificity for a predetermined or preselected or otherwise targeted substrate.

[0142] As used herein, “select” or grammatical variations thereof refers to picking or choosing a protease that is in complex with a protease trap polypeptide. Hence, for purposes herein, select refers to pulling out the protease based on its association in stable complexes with a protease trap polypeptide. Generally, selection can be facilitated by capture of the covalent complexes, and if desired, the protease can be isolated. For example, selection can be facilitated by labeling the protease trap polypeptide, for example, with a predetermined marker, tag or other detectable moiety, to thereby identify the protease based on its association in the stable complex.

[0143] As used herein, “identify” and grammatical variations thereof refers to the recognition of or knowledge of a protease in a stable complex. Typically, in the methods herein, the protease is identified by its association in a stable complex with a protease trap polypeptide, which can be accomplished, for example, by amplification (i.e. growth in an appropriate host cell) of the bound proteases in the complex followed by DNA sequencing.

[0144] As used herein, labeled for detection or separation means that that the molecule, such as a protease trap polypeptide, is associated with a detectable label, such as a fluorophore, or is associated with a tag or other moiety, such as for purification or isolation or separation. Detectably labeled refers to a molecule, such as a protease trap polypeptide, that is labeled for detection or separation.

[0145] As used herein, reference to amplification of a protease or proteolytically active portion of a protease, means that the amount of the protease or proteolytically active portion is increased, such as through isolation and cloning and expression, or, where the protease or proteolytically active portion is displayed on a microorganism, the microorganism is introduced into an appropriate host and grown or cultured so that more displayed protease or proteolytically active portion is produced.

[0146] As used herein, homogeneous with reference to a reaction mixture means that the reactants are in the liquid phase as a mixture, including as a solution or suspension.

[0147] As used herein, recitation that a collection of proteases or proteolytically active portions of proteases is “based on” a particular protease means that the collection is derived from the particular protease, such as by random or directed mutagenesis or rational design or other modification scheme or protocol, to produce a collection.

[0148] As used herein, a disease or condition that is treated by administration of t-PA refers to a disease or condition for which one of skill in the art would administer t-PA. Such conditions include, but are not limited to, fibrinolytic conditions, such as arterial thrombosis, venous thrombosis and thromboembolism, ischemic stroke, acquired coagulation disorders, disseminated intravascular coagulation, and precursors thereto, such as bacterial or viral infections, periodontitis, and neurological conditions.

[0149] As used herein, a disease or condition that is mediated by VEGFR-2 is involved in the pathology or etiology. Such conditions include, but are not limited to, inflammatory and angiogenic conditions, such as cancers, diabetic retinopathies, and ophthalmic disorders, including macular degeneration.

[0150] As used herein, “proteases,” “proteinases” and “peptidases” are interchangeably used to refer to enzymes that catalyze the hydrolysis of covalent peptidic bonds. These designations include zymogen forms and activated single-, two- and multiple-chain forms thereof. For clarity, reference to protease refers to all forms. Proteases include, for example, serine proteases, cysteine proteases, aspartic proteases, threonine and metallo-proteases depending on the catalytic activity of their active site and mechanism of cleaving peptide bonds of a target substrate.

[0151] As used herein, a zymogen refers to a protease that is activated by proteolytic cleavage, including maturation cleavage, such as activation cleavage, and/or complex formation with other protein(s) and/or cofactor(s). A zymogen is an inactive precursor of a proteolytic enzyme. Such precursors are generally larger, although not necessarily larger than the active form. With reference to serine proteases, zymogens are converted to active enzymes by specific cleavage, including catalytic and autocatalytic cleavage, or by binding of an activating co-factor, which generates an active enzyme. A zymogen, thus, is an enzymatically inactive protein that is converted to a proteolytic enzyme by the action of an activator. Cleavage can be effected autocatalytically Zymogens, generally, are inactive and can be converted to mature active polypeptides by catalytic or autocatalytic cleavage of the proregion from the zymogen.

[0152] As used herein, a “proregion,” “propeptide,” or “pro sequence,” refers to a region or a segment that is cleaved to produce a mature protein. This can include segments that function to suppress enzymatic activity by masking the catalytic machinery and thus preventing formation of the catalytic intermediate (i.e., by sterically occluding the substrate binding site). A proregion is a sequence of amino acids positioned at the amino terminus of a mature biologically active polypeptide and can be as little as a few amino acids or can be a multidomain structure.

[0153] As used herein, an activation sequence refers to a sequence of amino acids in a zymogen that are the site required for activation cleavage or maturation cleavage to form an active protease. Cleavage of an activation sequence can be catalyzed autocatalytically or by activating partners.

[0154] Activation cleavage is a type of maturation cleavage in which a conformational change required for activity occurs. This is a classical activation pathway, for example, for serine proteases in which a cleavage generates a new N-terminus which interacts with the conserved regions of catalytic machinery, such as catalytic residues, to induce conformational changes required for activity. Activation can result in production of multi-chain forms of the proteases. In some instances, single chain forms of the protease can exhibit proteolytic activity as a single chain.

[0155] As used herein, domain refers to a portion of a molecule, such as proteins or the encoding nucleic acids, that is structurally and/or functionally distinct from other portions of the molecule and is identifiable.

[0156] As used herein, a protease domain is the catalytically active portion of a protease. Reference to a protease domain of a protease includes the single, two- and multi-chain forms of any of these proteins. A protease domain of a protein contains all of the requisite properties of that protein required for its proteolytic activity, such as for example, its catalytic center.

[0157] As used herein, a catalytically active portion or proteolytically active portion of a protease refers to the protease domain, or any fragment or portion thereof that retains protease activity. Significantly, at least in vitro, the single chain forms of the proteases and catalytic domains or proteolytically active portions thereof (typically C-terminal truncations) exhibit protease activity.

[0158] As used herein, a “nucleic acid encoding a protease domain or catalytically active portion of a protease” refers to a nucleic acid encoding only the recited single chain protease domain or active portion thereof, and not the other contiguous portions of the protease as a continuous sequence.

[0159] As used herein, recitation that a polypeptide consists essentially of the protease domain means that the only portion of the polypeptide is a protease domain or a catalytically active portion thereof. The polypeptide can optionally, and generally will, include additional non-protease-derived sequences of amino acids.

[0160] As used herein, “S1-S4” refers to amino acid residues that form the binding sites for P1-P4 residues of a substrate (see, e.g., Schecter and Berger (1967) Biochem Biophys Res Commun 27:157-162). Each of S1-S4 contains one, two or more residues, which can be non-contiguous. These sites are numbered sequentially from the recognition site N-terminal to the site of proteolysis, referred to as the scissile bond.

[0161] As used herein, the terms “P1-P4” and “P1′-P4′” refer to the residues in a substrate peptide that specifically interact with the S1-S4 residues and S1′-S4′ residues, respectively, and are cleaved by the protease. P1-P4 refer to the residue positions on the N-terminal side of the cleavage site; P1′-P4′ refer to the residue positions to the C-terminal side of the cleavage site. Amino acid residues are labeled from N to C termini of a polypeptide substrate (Pi, . . . , P3, P2, P1, P1′, P2′, P3′, . . . , Pj). The respective binding sub-sites are labeled (Si, . . . , S3, S2, S1, S1′, S2′, S3′, . . . , Sj). The cleavage is catalyzed between P1 and P1.′

[0162] As used herein, a “binding pocket” refers to the residue or residues that interact with a specific amino acid or amino acids on a substrate. A “specificity pocket” is a binding pocket that contributes more energy than the others (the most important or dominant binding pocket). Typically, the binding step precedes the formation of the transition state that is necessary for the catalytic process to occur. S1-S4 and S1′-S4′ amino acids make up the substrate sequence binding pocket and facilitate substrate recognition by interaction with P1-P4 and P1′-P4′ amino acids of a peptide, polypeptide or protein substrate, respectively. Whether a protease interacts with a substrate is a function of the amino acids in the S1-S4 and S1′-S4′ positions. If the amino acids in any one or more of the S1, S2, S3, S4, S1′, S2′, S3′ and S4′ sub-sites interact with or recognize any one or more of the amino acids in the P1, P2, P3, P4, P1′, P2′, P3′ and P4′ sites in a substrate, then the protease can cleave the substrate. A binding pocket positions a target amino acid with a protease so that catalysis of a peptide bond and cleavage of a substrate is achieved. For example, serine proteases typically recognize P4-P2′ sites in a substrate; other proteases can have extended recognition beyond P4-P2′.

[0163] As used herein, amino acids that “contribute to extended substrate specificity” refers to those residues in the active site cleft in addition to the specificity pocket. These amino acids include the S1-S4, S1′-S4′ residues in a protease.

[0164] As used herein, secondary sites of interaction are outside the active site cleft. These can contribute to substrate recognition and catalysis. These amino acids include amino acids that can contribute second and third shell interactions with a substrate. For example, loops in the structure of a protease surrounding the S1-S4. S1′-S4′ amino acids play a role in positioning P1-P4, P1′-P4′ amino acids in the substrate thereby registering the scissile bond in the active site of a protease.

[0165] As used herein, active site of a protease refers to the substrate binding site where catalysis of the substrate occurs. The structure and chemical properties of the active site allow the recognition and binding of the substrate and subsequent hydrolysis and cleavage of the scissile bond in the substrate. The active site of a protease contains amino acids that contribute to the catalytic mechanism of peptide cleavage as well as amino acids that contribute to substrate sequence recognition, such as amino acids that contribute to extended substrate binding specificity.

[0166] As used herein, a “catalytic triad” or “active site residues” of a serine or cysteine protease refers to a combination of amino acids, typically three amino acids, that are in the active site of a serine or cysteine protease and contribute to the catalytic mechanism of peptide cleavage. Generally, a catalytic triad is found in serine proteases and provides an active nucleophile and acid/base catalysis. The catalytic triad of serine proteases contains three amino acids, which in chymotrypsin are Asp¹⁰², His⁵⁷, and Ser¹⁹⁵. These residues are critical for the catalytic efficiency of a serine protease.

[0167] As used herein, the “substrate recognition site” or “cleavage sequence” refers to the sequence recognized by the active site of a protease that is cleaved by a protease. Typically, for example, for a serine protease, a cleavage sequence is made up of the P1-P4 and P1′-P4′ amino acids in a substrate, where cleavage occurs after the P1 position. Typically, a cleavage sequence for a serine protease is six residues in length to match the extended substrate specificity of many proteases, but can be longer or shorter depending upon the protease. For example, the substrate recognition site or cleavage sequence of MT-SP 1 required for autocatalysis is RQARVV, where R is at the P4 position, Q is at the P3 position, A is at the P2 position and R is at the P1 position. Cleavage in MT-SP 1 occurs after position R followed by the sequence VVGG.

[0168] As used herein, target substrate refers to a substrate that is specifically cleaved at its substrate recognition site by a protease. Minimally, a target substrate includes the amino acids that make up the cleavage sequence. Optionally, a target substrate includes a peptide containing the cleavage sequence and any other amino acids. A full-length protein, allelic variant, isoform, or any portion thereof, containing a cleavage sequence recognized by a protease, is a target substrate for that protease. Additionally, a target substrate includes a peptide or protein containing an additional moiety that does not affect cleavage of the substrate by a protease. For example, a target substrate can include a four amino acid peptide or a full-length protein chemically linked to a fluorogenic moiety.

[0169] As used herein, cleavage refers to the breaking of peptide bonds by a protease. The cleavage site motif for a protease involves residues N- and C-terminal to the scissile bond (the unprimed and primed sides, respectively, with the cleavage site for a protease defined as . . . P3-P2-P1-P1′-P2′-P3′ . . . , and cleavage occurs between the P1 and P1′ residues). Typically, cleavage of a substrate is an activating cleavage or an inhibitory cleavage. An activating cleavage refers to cleavage of a polypeptide from an inactive form to an active form. This includes, for example, cleavage of a zymogen to an active enzyme, and/or cleavage of a progrowth factor into an active growth factor. For example, MT-SP1 can auto-activate by cleaving a target substrate at the P1-P4 sequence of RQAR. An activating cleavage also is cleavage whereby a protein is cleaved into one or more proteins that themselves have activity. For example, activating cleavage occurs in the complement system, which is an irreversible cascade of proteolytic cleavage events whose termination results in the formation of multiple effector molecules that stimulate inflammation, facilitate antigen phagocytosis, and lyse some cells directly.

[0170] As used herein, an inhibitory cleavage is cleavage of a protein into one or more degradation products that are not functional. Inhibitory cleavage results in the diminishment or reduction of an activity of a protein. Typically, a reduction of an activity of a protein reduces the pathway or process for which the protein is involved. In one example, the cleavage of any one or more target proteins, such as for example a VEGFR, that is an inhibitory cleavage results in the concomitant reduction or inhibition of any one or more functions or activities of the target substrate. For example, for cleavage of a VEGFR, activities that can be inhibited include, but are not limited to, ligand binding, kinase activity, or angiogenic activity such as angiogenic activity in vivo or in vitro. To be inhibitory, the cleavage reduces activity by at least about 10%, 20%, 30%, 40%, 50%, 60%, 70%, 80%, 90%, 95%, 99.9% or more compared to a native form of the protein. The percent cleavage of a protein that is required for the cleavage to be inhibitory varies among proteins but can be determined by assaying for an activity of the protein.

[0171] As used herein, a protease polypeptide is a polypeptide having an amino acid sequence corresponding to any one of the candidate proteases, or variant proteases thereof described herein.

[0172] As used herein, a “modified protease,” or “mutein protease” refers to a protease polypeptide (protein) that has one or more modifications in primary sequence compared to a wild-type or template protease. The one or more mutations can be one or more amino acid replacements (substitutions), insertions, deletions and any combination thereof. A modified protease polypeptide includes those with 1, 2, 3, 4, 5, 6, 7, 8, 9, 10, 11, 12, 13, 14, 15, 16, 17, 18, 19, 20, or more modified positions. A modified protease can be a full-length protease, or can be a catalytically active portion thereof of a modified full length protease as long as the modified protease is proteolytically active. Generally, these mutations change the specificity and activity of the wild-type or template proteases for cleavage of any one or more desired or predetermined target substrates. In addition to containing modifications in regions that alter the substrate specificity of a protease, a modified protease also can tolerate other modifications in regions that are non-essential to the substrate specificity of a protease. Hence, a modified protease typically has 60%, 70%, 80%, 85%, 90%, 91%, 92%, 93%, 94%, 95%, 96%, 97%, 98%, 99% or more sequence identity to a corresponding sequence of amino acids of a wildtype or scaffold protease. A modified full-length protease or a catalytically active portion thereof of a modified protease can include proteases that are fusion proteins as long as the fusion itself does not alter substrate specificity of a protease.

[0173] As used herein, chymotrypsin numbering refers to the amino acid numbering of a mature chymotrypsin polypeptide of SEQ ID NO:391. Alignment of a protease of the chymotrypsin family (i.e. u-PA, t-PA, MT-SP 1, and others), including the protease domain, can be made with chymotrypsin. In such an instance, the amino acids of the protease that correspond to amino acids of chymotrypsin are given the numbering of the chymotrypsin amino acids. Corresponding positions can be determined by such alignment by one of skill in the art using manual alignments or by using the numerous alignment programs available (for example, BLASTP). Corresponding positions also can be based on structural alignments, for example by using computer simulated alignments of protein structure. Recitation that amino acids of a polypeptide correspond to amino acids in a disclosed sequence refers to amino acids identified upon alignment of the polypeptide with the disclosed sequence to maximize identity or homology (where conserved amino acids are aligned) using a standard alignment algorithm, such as the GAP algorithm. For example, upon alignment of u-PA with the mature chymotrypsin polypeptide amino acid C168 in the precursor sequence of u-PA set forth in SEQ ID NO: 191 aligns with amino acid C1 of the mature chymotrypsin polypeptide. Thus, amino acid C168 in u-PA also is C1 based on chymotrypsin numbering. Using such a chymotrypsin numbering standard, amino acid L244 in the precursor u-PA sequence set forth in SEQ ID NO:191 is the same as L73 based on chymotrypsin numbering and amino acid and I260 is the same as I89 based on chymotrypsin numbering. In another example, upon alignment of the serine protease domain of MT-SP1 (corresponding to amino acids 615 to 855 in SEQ ID NO:253) with mature chymotrypsin, V at position 615 in MT-SP1 is given the chymotrypsin numbering of V16. Subsequent amino acids are numbered accordingly. Thus, an F at amino acid position 708 of full-length MT-SP1 (SEQ ID NO:253), corresponds to F99 based on chymotrypsin numbering. Where a residue exists in a protease, but is not present in chymotrypsin, the amino acid residue is given a letter notation. For example, residues in chymotrypsin that are part of a loop with amino acid 60 based on chymotrypsin numbering, but are inserted in the MT-SP1 sequence compared to chymotrypsin, are referred to for example as Asp60b or Arg60c.

[0174] As used herein, specificity for a target substrate refers to a preference for cleavage of a target substrate by a protease compared to another substrate, referred to as a non-target substrate. Specificity is reflected in the second order rate constant or specificity constant (k_{cat}/Kₘ), which is a measure of the affinity of a protease for its substrate and the efficiency of the enzyme.

[0175] As used herein, a specificity constant for cleavage is (k_{cat}/Kₘ), wherein Kₘ is the Michaelis-Menton constant ([S] at one half Vₘₐₓ) and K_{cat} is the Vₘₐₓ/[E_{T}], where E_{T} is the final enzyme concentration. The parameters k_{cat}, Kₘ and k_{cat}/Kₘ can be calculated by graphing the inverse of the substrate concentration versus the inverse of the velocity of substrate cleavage, and fitting to the Lineweaver-Burk equation (1/velocity=(Kₘ/Vₘₐₓ)(1/[S])+1/Vₘₐₓ; where Vₘₐₓ=[E_{T}]k_{cat}). Any method to determine the rate of increase of cleavage over time in the presence of various concentrations of substrate can be used to calculate the specificity constant. For example, a substrate is linked to a fluorogenic moiety, which is released upon cleavage by a protease. By determining the rate of cleavage at different enzyme concentrations, k_{cat} can be determined for a particular protease. The specificity constant can be used to determine the site specific preferences of an amino acid in any one or more of the S1-S4 pockets of a protease for a concomitant P1-P4 amino acid in a substrate using standard methods in the art, such as a positional scanning combinatorial library (PS-SCL). Additionally, the specificity constant also can be used to determine the preference of a protease for one target substrate over another substrate.

[0176] As used herein, a substrate specificity ratio is the ratio of specificity constants and can be used to compare specificities of two or more proteases or a protease for two more substrates. For example, substrate specificity of a protease for competing substrates or of competing proteases for a substrate can be compared by comparing k_{cat}/Kₘ For example, a protease that has a specificity constant of 2×10⁶ M⁻¹ sec⁻¹ for a target substrate and 2×10⁴ M⁻¹ sec⁻¹ for a non-target substrate is more specific for the target substrate. Using the specificity constants from above, the protease has a substrate specificity ratio of 100 for the target protease.

[0177] As used herein, preference for a target substrate can be expressed as a substrate specificity ratio. The particular value of the ratio that reflects a preference is a function of the substrates and proteases at issue. A substrate specificity ratio that is greater than 1 signifies a preference for a target substrate and a substrate specificity less than 1 signifies a preference for a non-target substrate. Generally, a ratio of at least or about 1 reflects a sufficient difference for a protease to be considered a candidate therapeutic.

[0178] As used herein, altered specificity refers to a change in substrate specificity of a modified or selected protease compared to a starting wild-type or template protease. Generally, the change in specificity is a reflection of the change in preference of a modified protease for a target substrate compared to a wildtype substrate of the template protease (herein referred to as a non-target substrate). Typically, modified proteases or selected proteases provided herein exhibits increased substrate specificity for any one or more predetermined or desired cleavage sequences of a target protein compared to the substrate specificity of a template protease. For example, a modified protease or selected protease that has a substrate specificity ratio of 100 for a target substrate versus a non-target substrate exhibits a 10-fold increased specificity compared to a scaffold protease with a substrate specificity ratio of 10. In another example, a modified protease that has a substrate specificity ratio of 1 compared to a ratio of 0.1, exhibits a 10-fold increase in substrate specificity. To exhibit increased specificity compared to a template protease, a modified protease has a 1.5-fold, 2-fold, 5-fold, 10-fold, 50-fold, 100-fold, 200-fold, 300-fold, 400-fold, 500-fold or more greater substrate specificity for any one of more of the predetermined target substrates.

[0179] As used herein, “selectivity” can be used interchangeably with specificity when referring to the ability of a protease to choose and cleave one target substrate from among a mixture of competing substrates. Increased selectivity of a protease for a target substrate compared to any other one or more target substrates can be determined, for example, by comparing the specificity constants of cleavage of the target substrates by a protease. For example, if a protease has a specificity constant of cleavage of 2×10⁶ M⁻¹ sec⁻¹ for a target substrate and 2×10⁴ M⁻¹ sec⁻¹ for any other one of more substrates, the protease is more selective for the former target substrate.

[0180] As used herein, activity refers to a functional activity or activities of a polypeptide or portion thereof associated with a full-length (complete) protein. Functional activities include, but are not limited to, biological activity, catalytic or enzymatic activity, antigenicity (ability to bind to or compete with a polypeptide for binding to an anti-polypeptide antibody), immunogenicity, ability to form multimers, and the ability to specifically bind to a receptor or ligand for the polypeptide.

[0181] As used herein, catalytic activity or cleavage activity refers to the activity of a protease as assessed in in vitro proteolytic assays that detect proteolysis of a selected substrate. Cleavage activity can be measured by assessing catalytic efficiency of a protease.

[0182] As used herein, activity towards a target substrate refers to cleavage activity and/or functional activity, or other measurement that reflects the activity of a protease on or towards a target substrate. Cleavage activity can be measured by assessing catalytic efficiency of a protease. For purposes herein, an activity is increased if a protease exhibits greater proteolysis or cleavage of a target substrate and/or modulates (i.e. activates or inhibits) a functional activity of a target substrate protein as compared to the absence of the protease.

[0183] As used herein, serine protease or serine endopeptidases refers to a class of peptidases, which are characterized by the presence of a serine residue in the active center of the enzyme. Serine proteases participate in a wide range of functions in the body, including blood clotting, inflammation as well as digestive enzymes in prokaryotes and eukaryotes. The mechanism of cleavage by “serine proteases,” is based on nucleophilic attack of a targeted peptidic bond by a serine. Cysteine, threonine or water molecules associated with aspartate or metals also can play this role. Aligned side chains of serine, histidine and aspartate form a catalytic triad common to most serine proteases. The active site of serine proteases is shaped as a cleft where the polypeptide substrate binds. Exemplary serine proteases include urinary plasminogen activator (u-PA) set forth in SEQ ID NO: 433 and MT-SP1 set forth in SEQ ID NO:253, and catalytically active portions thereof, for example the MT-SP1 protease domain (also called the B-chain) set forth in SEQ ID NO:505.

[0184] As used herein, a human protein is one encoded by a nucleic acid molecule, such as DNA, present in the genome of a human, including all allelic variants and conservative variations thereof. A variant or modification of a protein is a human protein if the modification is based on the wildtype or prominent sequence of a human protein.

[0185] As used herein, the residues of naturally occurring α-amino acids are the residues of those 20 α-amino acids found in nature which are incorporated into protein by the specific recognition of the charged tRNA molecule with its cognate mRNA codon in humans.

[0186] As used herein, non-naturally occurring amino acids refer to amino acids that are not genetically encoded.

[0187] As used herein, nucleic acids include DNA, RNA and analogs thereof, including peptide nucleic acids (PNA) and mixtures thereof. Nucleic acids can be single or double-stranded. When referring to probes or primers, which are optionally labeled, such as with a detectable label, such as a fluorescent or radiolabel, single-stranded molecules are contemplated. Such molecules are typically of a length such that their target is statistically unique or of low copy number (typically less than 5, generally less than 3) for probing or priming a library. Generally a probe or primer contains at least 14, 16 or 30 contiguous nucleotides of sequence complementary to or identical to a gene of interest. Probes and primers can be 10, 20, 30, 50, 100 or more nucleic acids long.

[0188] As used herein, a peptide refers to a polypeptide that is from 2 to 40 amino acids in length.

[0189] As used herein, the amino acids which occur in the various sequences of amino acids provided herein are identified according to their known, three-letter or one-letter abbreviations (Table 1). The nucleotides which occur in the various nucleic acid fragments are designated with the standard single-letter designations used routinely in the art.

[0190] As used herein, an “amino acid” is an organic compound containing an amino group and a carboxylic acid group. A polypeptide contains two or more amino acids. For purposes herein, amino acids include the twenty naturally-occurring amino acids, non-natural amino acids and amino acid analogs (i.e., amino acids wherein the α-carbon has a side chain).

[0191] As used herein, “amino acid residue” refers to an amino acid formed upon chemical digestion (hydrolysis) of a polypeptide at its peptide linkages. The amino acid residues described herein are presumed to be in the “L” isomeric form. Residues in the “D” isomeric form, which are so designated, can be substituted for any L-amino acid residue as long as the desired functional property is retained by the polypeptide. NH₂ refers to the free amino group present at the amino terminus of a polypeptide. COOH refers to the free carboxy group present at the carboxyl terminus of a polypeptide. In keeping with standard polypeptide nomenclature described in J. Biol. Chem., 243: 3552-3559 (1969), and adopted 37 C.F.R. §§ 1.821-1.822, abbreviations for amino acid residues are shown in Table 1:

TABLE 1
Table of Correspondence

SYMBOL

| 1-Letter | 3-Letter | AMINO ACID |
|---|---|---|
| Y | Tyr | Tyrosine |
| G | Gly | Glycine |
| F | Phe | Phenylalanine |
| M | Met | Methionine |
| A | Ala | Alanine |
| S | Ser | Serine |
| I | Ile | Isoleucine |
| L | Leu | Leucine |
| T | Thr | Threonine |
| V | Val | Valine |
| P | Pro | proline |
| K | Lys | Lysine |
| H | His | Histidine |
| Q | Gln | Glutamine |
| E | Glu | glutamic acid |
| Z | Glx | Glu and/or Gln |
| W | Trp | Tryptophan |
| R | Arg | Arginine |
| D | Asp | aspartic acid |
| N | Asn | asparagines |
| B | Asx | Asn and/or Asp |
| C | Cys | Cysteine |
| X | Xaa | Unknown or other |

[0192] It should be noted that all amino acid residue sequences represented herein by formulae have a left to right orientation in the conventional direction of amino-terminus to carboxyl-terminus. In addition, the phrase “amino acid residue” is broadly defined to include the amino acids listed in the Table of Correspondence (Table 1) and modified and unusual amino acids, such as those referred to in 37 C.F.R. §§ 1.821-1.822, and incorporated herein by reference. Furthermore, it should be noted that a dash at the beginning or end of an amino acid residue sequence indicates a peptide bond to a further sequence of one or more amino acid residues, to an amino-terminal group such as NH₂ or to a carboxyl-terminal group such as COOH.

[0193] As used herein, “naturally occurring amino acids” refer to the 20 L-amino acids that occur in polypeptides.

[0194] As used herein, “non-natural amino acid” refers to an organic compound that has a structure similar to a natural amino acid but has been modified structurally to mimic the structure and reactivity of a natural amino acid. Non-naturally occurring amino acids thus include, for example, amino acids or analogs of amino acids other than the 20 naturally-occurring amino acids and include, but are not limited to, the D-isostereomers of amino acids. Exemplary non-natural amino acids are described herein and are known to those of skill in the art.

[0195] As used herein, an isokinetic mixture is one in which the molar ratios of amino acids has been adjusted based on their reported reaction rates (see, e.g., Ostresh et al., (1994) Biopolymers 34:1681).

[0196] As used herein, a DNA construct is a single or double stranded, linear or circular DNA molecule that contains segments of DNA combined and juxtaposed in a manner not found in nature. DNA constructs exist as a result of human manipulation, and include clones and other copies of manipulated molecules.

[0197] As used herein, a DNA segment is a portion of a larger DNA molecule having specified attributes. For example, a DNA segment encoding a specified polypeptide is a portion of a longer DNA molecule, such as a plasmid or plasmid fragment, which, when read from the 5′ to 3′ direction, encodes the sequence of amino acids of the specified polypeptide.

[0198] As used herein, the term ortholog means a polypeptide or protein obtained from one species that is the functional counterpart or a polypeptide or protein from a different species. Sequence differences among orthologs are the result of speciation.

[0199] As used herein, the term polynucleotide means a single- or double-stranded polymer of deoxyribonucleotides or ribonucleotide bases read from the 5′ to the 3′ end. Polynucleotides include RNA and DNA, and can be isolated from natural sources, synthesized in vitro, or prepared from a combination of natural and synthetic molecules. The length of a polynucleotide molecule is given herein in terms of nucleotides (abbreviated “nt”) or base pairs (abbreviated “bp”). The term nucleotides is used for single- and double-stranded molecules where the context permits. When the term is applied to double-stranded molecules it is used to denote overall length and will be understood to be equivalent to the term base pairs. It will be recognized by those skilled in the art that the two strands of a double-stranded polynucleotide can differ slightly in length and that the ends thereof can be staggered; thus all nucleotides within a double-stranded polynucleotide molecule can not be paired. Such unpaired ends will, in general, not exceed 20 nucleotides in length.

[0200] As used herein, “similarity” between two proteins or nucleic acids refers to the relatedness between the sequence of amino acids of the proteins or the nucleotide sequences of the nucleic acids. Similarity can be based on the degree of identity and/or homology of sequences of residues and the residues contained therein. Methods for assessing the degree of similarity between proteins or nucleic acids are known to those of skill in the art. For example, in one method of assessing sequence similarity, two amino acid or nucleotide sequences are aligned in a manner that yields a maximal level of identity between the sequences. “Identity” refers to the extent to which the amino acid or nucleotide sequences are invariant. Alignment of amino acid sequences, and to some extent nucleotide sequences, also can take into account conservative differences and/or frequent substitutions in amino acids (or nucleotides). Conservative differences are those that preserve the physico-chemical properties of the residues involved. Alignments can be global (alignment of the compared sequences over the entire length of the sequences and including all residues) or local (the alignment of a portion of the sequences that includes only the most similar region or regions).

[0201] “Identity” per se has an art-recognized meaning and can be calculated using published techniques. (See, e.g.: Computational Molecular Biology, Lesk, A. M., ed., Oxford University Press, New York, 1988; Biocomputing: Informatics and Genome Projects, Smith, D. W., ed., Academic Press, New York, 1993; Computer Analysis of Sequence Data, Part I, Griffin, A. M., and Griffin, H. G., eds., Humana Press, New Jersey, 1994; Sequence Analysis in Molecular Biology, von Heinje, G., Academic Press, 1987; and Sequence Analysis Primer, Gribskov, M. and Devereux, J., eds., M Stockton Press, New York, 1991). While there exists a number of methods to measure identity between two polynucleotide or polypeptides, the term “identity” is well known to skilled artisans (Carillo, H. & Lipton, D., SIAM J Applied Math 48:1073 (1988)).

[0202] As used herein, homologous (with respect to nucleic acid and/or amino acid sequences) means about greater than or equal to 25% sequence homology, typically greater than or equal to 25%, 40%, 50%, 60%, 70%, 80%, 85%, 90% or 95% sequence homology; the precise percentage can be specified if necessary. For purposes herein the terms “homology” and “identity” are often used interchangeably, unless otherwise indicated. In general, for determination of the percentage homology or identity, sequences are aligned so that the highest order match is obtained (see, e.g.: Computational Molecular Biology, Lesk, A. M., ed., Oxford University Press, New York, 1988; Biocomputing. Informatics and Genome Projects, Smith, D. W., ed., Academic Press, New York, 1993; Computer Analysis of Sequence Data, Part I, Griffin, A. M., and Griffin, H. G., eds., Humana Press, New Jersey, 1994; Sequence Analysis in Molecular Biology, von Heinje, G., Academic Press, 1987; and Sequence Analysis Primer, Gribskov, M. and Devereux, J., eds., M Stockton Press, New York, 1991; Carillo et al. (1988) SIAM J Applied Math 48:1073). By sequence homology, the number of conserved amino acids is determined by standard alignment algorithms programs, and can be used with default gap penalties established by each supplier. Substantially homologous nucleic acid molecules would hybridize typically at moderate stringency or at high stringency all along the length of the nucleic acid of interest. Also contemplated are nucleic acid molecules that contain degenerate codons in place of codons in the hybridizing nucleic acid molecule.

[0203] Whether any two molecules have nucleotide sequences or amino acid sequences that are at least 60%, 70%, 80%, 85%, 90%, 95%, 96%, 97%, 98% or 99% “identical” or “homologous” can be determined using known computer algorithms such as the “FASTA” program, using for example, the default parameters as in Pearson et al. (1988) Proc. Natl. Acad. Sci. USA 85:2444 (other programs include the GCG program package (Devereux, J., et al., Nucleic Acids Research 12(I):387 (1984)), BLASTP, BLASTN, FASTA (Atschul, S. F., et al., J Molec Biol 215:403 (1990)); Guide to Huge Computers, Martin J. Bishop, ed., Academic Press, San Diego, 1994, and Carillo et al. (1988) SIAM J Applied Math 48:1073). For example, the BLAST function of the National Center for Biotechnology Information database can be used to determine identity. Other commercially or publicly available programs include, DNAStar “MegAlign” program (Madison, Wis.) and the University of Wisconsin Genetics Computer Group (UWG) “Gap” program (Madison Wis.). Percent homology or identity of proteins and/or nucleic acid molecules can be determined, for example, by comparing sequence information using a GAP computer program (e.g., Needleman et al. (1970) J. Mol. Biol. 48:443, as revised by Smith and Waterman ((1981) Adv. Appl. Math. 2:482). Briefly, the GAP program defines similarity as the number of aligned symbols (i.e., nucleotides or amino acids), which are similar, divided by the total number of symbols in the shorter of the two sequences. Default parameters for the GAP program can include: (1) a unary comparison matrix (containing a value of 1 for identities and 0 for non-identities) and the weighted comparison matrix of Gribskov et al. (1986) Nucl. Acids Res. 14:6745, as described by Schwartz and Dayhoff, eds., ATLAS OF PROTEIN SEQUENCE AND STRUCTURE, National Biomedical Research Foundation, pp. 353-358 (1979); (2) a penalty of 3.0 for each gap and an additional 0.10 penalty for each symbol in each gap; and (3) no penalty for end gaps.

[0204] Therefore, as used herein, the term “identity” or “homology” represents a comparison between a test and a reference polypeptide or polynucleotide. As used herein, the term at least “90% identical to” refers to percent identities from 90 to 99.99 relative to the reference nucleic acid or amino acid sequence of the polypeptide. Identity at a level of 90% or more is indicative of the fact that, assuming for exemplification purposes a test and reference polypeptide length of 100 amino acids are compared. No more than 10% (i.e., 10 out of 100) of the amino acids in the test polypeptide differs from that of the reference polypeptide. Similar comparisons can be made between test and reference polynucleotides. Such differences can be represented as point mutations randomly distributed over the entire length of a polypeptide or they can be clustered in one or more locations of varying length up to the maximum allowable, e.g. 10/100 amino acid difference (approximately 90% identity). Differences are defined as nucleic acid or amino acid substitutions, insertions or deletions. At the level of homologies or identities above about 85-90%, the result should be independent of the program and gap parameters set; such high levels of identity can be assessed readily, often by manual alignment without relying on software.

[0205] As used herein, an aligned sequence refers to the use of homology (similarity and/or identity) to align corresponding positions in a sequence of nucleotides or amino acids. Typically, two or more sequences that are related by 50% or more identity are aligned. An aligned set of sequences refers to 2 or more sequences that are aligned at corresponding positions and can include aligning sequences derived from RNAs, such as ESTs and other cDNAs, aligned with genomic DNA sequence.

[0206] As used herein, “primer” refers to a nucleic acid molecule that can act as a point of initiation of template-directed DNA synthesis under appropriate conditions (e.g., in the presence of four different nucleoside triphosphates and a polymerization agent, such as DNA polymerase, RNA polymerase or reverse transcriptase) in an appropriate buffer and at a suitable temperature. It will be appreciated that a certain nucleic acid molecules can serve as a “probe” and as a “primer.” A primer, however, has a 3′ hydroxyl group for extension. A primer can be used in a variety of methods, including, for example, polymerase chain reaction (PCR), reverse-transcriptase (RT)-PCR, RNA PCR, LCR, multiplex PCR, panhandle PCR, capture PCR, expression PCR, 3′ and 5′ RACE, in situ PCR, ligation-mediated PCR and other amplification protocols.

[0207] As used herein, “primer pair” refers to a set of primers that includes a 5′ (upstream) primer that hybridizes with the 5′ end of a sequence to be amplified (e.g. by PCR) and a 3′ (downstream) primer that hybridizes with the complement of the 3′ end of the sequence to be amplified.

[0208] As used herein, “specifically hybridizes” refers to annealing, by complementary base-pairing, of a nucleic acid molecule (e.g. an oligonucleotide) to a target nucleic acid molecule. Those of skill in the art are familiar with in vitro and in vivo parameters that affect specific hybridization, such as length and composition of the particular molecule. Parameters particularly relevant to in vitro hybridization further include annealing and washing temperature, buffer composition and salt concentration. Exemplary washing conditions for removing non-specifically bound nucleic acid molecules at high stringency are 0.1×SSPE, 0.1% SDS, 65° C., and at medium stringency are 0.2×SSPE, 0.1% SDS, 50° C. Equivalent stringency conditions are known in the art. The skilled person can readily adjust these parameters to achieve specific hybridization of a nucleic acid molecule to a target nucleic acid molecule appropriate for a particular application.

[0209] As used herein, substantially identical to a product means sufficiently similar so that the property of interest is sufficiently unchanged so that the substantially identical product can be used in place of the product.

[0210] As used herein, it also is understood that the terms “substantially identical” or “similar” varies with the context as understood by those skilled in the relevant art.

[0211] As used herein, an allelic variant or allelic variation references any of two or more alternative forms of a gene occupying the same chromosomal locus. Allelic variation arises naturally through mutation, and can result in phenotypic polymorphism within populations. Gene mutations can be silent (no change in the encoded polypeptide) or can encode polypeptides having altered amino acid sequence. The term “allelic variant” also is used herein to denote a protein encoded by an allelic variant of a gene. Typically the reference form of the gene encodes a wildtype form and/or predominant form of a polypeptide from a population or single reference member of a species. Typically, allelic variants, which include variants between and among species typically have at least 80%, 90% or greater amino acid identity with a wildtype and/or predominant form from the same species; the degree of identity depends upon the gene and whether comparison is interspecies or intraspecies. Generally, intraspecies allelic variants have at least about 80%, 85%, 90% or 95% identity or greater with a wildtype and/or predominant form, including 96%, 97%, 98%, 99% or greater identity with a wildtype and/or predominant form of a polypeptide. Reference to an allelic variant herein generally refers to variations n proteins among members of the same species.

[0212] As used herein, “allele,” which is used interchangeably herein with “allelic variant” refers to alternative forms of a gene or portions thereof. Alleles occupy the same locus or position on homologous chromosomes. When a subject has two identical alleles of a gene, the subject is said to be homozygous for that gene or allele. When a subject has two different alleles of a gene, the subject is said to be heterozygous for the gene. Alleles of a specific gene can differ from each other in a single nucleotide or several nucleotides, and can include substitutions, deletions and insertions of nucleotides. An allele of a gene also can be a form of a gene containing a mutation.

[0213] As used herein, species variants refer to variants in polypeptides among different species, including different mammalian species, such as mouse and human.

[0214] As used herein, a splice variant refers to a variant produced by differential processing of a primary transcript of genomic DNA that results in more than one type of mRNA.

[0215] As used herein, modification is in reference to modification of a sequence of amino acids of a polypeptide or a sequence of nucleotides in a nucleic acid molecule and includes deletions, insertions, and replacements of amino acids and nucleotides, respectively. Methods of modifying a polypeptide are routine to those of skill in the art, such as by using recombinant DNA methodologies.

[0216] As used herein, a peptidomimetic is a compound that mimics the conformation and certain stereochemical features of the biologically active form of a particular peptide. In general, peptidomimetics are designed to mimic certain desirable properties of a compound, but not the undesirable properties, such as flexibility, that lead to a loss of a biologically active conformation and bond breakdown. Peptidomimetics can be prepared from biologically active compounds by replacing certain groups or bonds that contribute to the undesirable properties with bioisosteres. Bioisosteres are known to those of skill in the art. For example the methylene bioisostere CH₂S has been used as an amide replacement in enkephalin analogs (see, e.g., Spatola (1983) pp. 267-357 in Chemistry and Biochemistry of Amino Acids, Peptides, and Proteins, Weinstein, Ed. volume 7, Marcel Dekker, New York). Morphine, which can be administered orally, is a compound that is a peptidomimetic of the peptide endorphin. For purposes herein, cyclic peptides are included among peptidomimetics as are polypeptides in which one or more peptide bonds is/are replaced by a mimic.

[0217] As used herein, a polypeptide comprising a specified percentage of amino acids set forth in a reference polypeptide refers to the proportion of contiguous identical amino acids shared between a polypeptide and a reference polypeptide. For example, an isoform that comprises 70% of the amino acids set forth in a reference polypeptide having a sequence of amino acids set forth in SEQ ID NO:XX, which recites 147 amino acids, means that the reference polypeptide contains at least 103 contiguous amino acids set forth in the amino acid sequence of SEQ ID NO:XX.

[0218] As used herein, the term promoter means a portion of a gene containing DNA sequences that provide for the binding of RNA polymerase and initiation of transcription. Promoter sequences are commonly, but not always, found in the 5′ non-coding region of genes.

[0219] As used herein, isolated or purified polypeptide or protein or biologically-active portion thereof is substantially free of cellular material or other contaminating proteins from the cell or tissue from which the protein is derived, or substantially free from chemical precursors or other chemicals when chemically synthesized. Preparations can be determined to be substantially free if they appear free of readily detectable impurities as determined by standard methods of analysis, such as thin layer chromatography (TLC), gel electrophoresis and high performance liquid chromatography (HPLC), used by those of skill in the art to assess such purity, or sufficiently pure such that further purification would not detectably alter the physical and chemical properties, such as enzymatic and biological activities, of the substance. Methods for purification of the compounds to produce substantially chemically pure compounds are known to those of skill in the art. A substantially chemically pure compound, however, can be a mixture of stereoisomers. In such instances, further purification might increase the specific activity of the compound.

[0220] The term substantially free of cellular material includes preparations of proteins in which the protein is separated from cellular components of the cells from which it is isolated or recombinantly-produced. In one embodiment, the term substantially free of cellular material includes preparations of protease proteins having less that about 30% (by dry weight) of non-protease proteins (also referred to herein as a contaminating protein), generally less than about 20% of non-protease proteins or 10% of non-protease proteins or less that about 5% of non-protease proteins. When the protease protein or active portion thereof is recombinantly produced, it also is substantially free of culture medium, i.e., culture medium represents less than about or at 20%, 10% or 5% of the volume of the protease protein preparation.

[0221] As used herein, the term substantially free of chemical precursors or other chemicals includes preparations of protease proteins in which the protein is separated from chemical precursors or other chemicals that are involved in the synthesis of the protein. The term includes preparations of protease proteins having less than about 30% (by dry weight) 20%, 10%, 5% or less of chemical precursors or non-protease chemicals or components.

[0222] As used herein, synthetic, with reference to, for example, a synthetic nucleic acid molecule or a synthetic gene or a synthetic peptide refers to a nucleic acid molecule or polypeptide molecule that is produced by recombinant methods and/or by chemical synthesis methods.

[0223] As used herein, production by recombinant means by using recombinant DNA methods means the use of the well known methods of molecular biology for expressing proteins encoded by cloned DNA.

[0224] As used herein, vector (or plasmid) refers to discrete elements that are used to introduce a heterologous nucleic acid into cells for either expression or replication thereof. The vectors typically remain episomal, but can be designed to effect integration of a gene or portion thereof into a chromosome of the genome. Also contemplated are vectors that are artificial chromosomes, such as yeast artificial chromosomes and mammalian artificial chromosomes. Selection and use of such vehicles are well known to those of skill in the art.

[0225] As used herein, an expression vector includes vectors capable of expressing DNA that is operatively linked with regulatory sequences, such as promoter regions, that are capable of effecting expression of such DNA fragments. Such additional segments can include promoter and terminator sequences, and optionally can include one or more origins of replication, one or more selectable markers, an enhancer, a polyadenylation signal, and the like. Expression vectors are generally derived from plasmid or viral DNA, or can contain elements of both. Thus, an expression vector refers to a recombinant DNA or RNA construct, such as a plasmid, a phage, recombinant virus or other vector that, upon introduction into an appropriate host cell, results in expression of the cloned DNA. Appropriate expression vectors are well known to those of skill in the art and include those that are replicable in eukaryotic cells and/or prokaryotic cells and those that remain episomal or those which integrate into the host cell genome.

[0226] As used herein, vector also includes “virus vectors” or “viral vectors.” Viral vectors are engineered viruses that are operatively linked to exogenous genes to transfer (as vehicles or shuttles) the exogenous genes into cells.

[0227] As used herein, an adenovirus refers to any of a group of DNA-containing viruses that cause conjunctivitis and upper respiratory tract infections in humans. As used herein, naked DNA refers to histone-free DNA that can be used for vaccines and gene therapy. Naked DNA is the genetic material that is passed from cell to cell during a gene transfer processed called transformation. In transformation, purified or naked DNA is taken up by the recipient cell which will give the recipient cell a new characteristic or phenotype.

[0228] As used herein, operably or operatively linked when referring to DNA segments means that the segments are arranged so that they function in concert for their intended purposes, e.g., transcription initiates in the promoter and proceeds through the coding segment to the terminator.

[0229] As used herein, protein binding sequence refers to a protein or peptide sequence that is capable of specific binding to other protein or peptide sequences generally, to a set of protein or peptide sequences or to a particular protein or peptide sequence.

[0230] As used herein, epitope tag refers to a short stretch of amino acid residues corresponding to an epitope to facilitate subsequent biochemical and immunological analysis of the epitope tagged protein or peptide. Epitope tagging is achieved by adding the sequence of the epitope tag to a protein-encoding sequence in an appropriate expression vector. Epitope tagged proteins can be affinity purified using highly specific antibodies raised against the tags.

[0231] As used herein, metal binding sequence refers to a protein or peptide sequence that is capable of specific binding to metal ions generally, to a set of metal ions or to a particular metal ion.

[0232] As used herein the term assessing is intended to include quantitative and qualitative determination in the sense of obtaining an absolute value for the activity of a protease, or a domain thereof, present in the sample, and also of obtaining an index, ratio, percentage, visual or other value indicative of the level of the activity. Assessment can be direct or indirect and the chemical species actually detected need not of course be the proteolysis product itself but can for example be a derivative thereof or some further substance. For example, detection of a cleavage product of a complement protein, such as by SDS-PAGE and protein staining with Coomasie blue.

[0233] As used herein, biological activity refers to the in vivo activities of a compound or physiological responses that result upon in vivo administration of a compound, composition or other mixture. Biological activity, thus, encompasses therapeutic effects and pharmaceutical activity of such compounds, compositions and mixtures. Biological activities can be observed in in vitro systems designed to test or use such activities. Thus, for purposes herein a biological activity of a protease is its catalytic activity in which a polypeptide is hydrolyzed.

[0234] As used herein equivalent, when referring to two sequences of nucleic acids, means that the two sequences in question encode the same sequence of amino acids or equivalent proteins. When equivalent is used in referring to two proteins or peptides, it means that the two proteins or peptides have substantially the same amino acid sequence with only amino acid substitutions that do not substantially alter the activity or function of the protein or peptide. When equivalent refers to a property, the property does not need to be present to the same extent (e.g., two peptides can exhibit different rates of the same type of enzymatic activity), but the activities are usually substantially the same. Complementary, when referring to two nucleotide sequences, means that the two sequences of nucleotides are capable of hybridizing, typically with less than 25%, 15% or 5% mismatches between opposed nucleotides. If necessary, the percentage of complementarity will be specified. Typically the two molecules are selected such that they will hybridize under conditions of high stringency.

[0235] As used herein, an agent that modulates the activity of a protein or expression of a gene or nucleic acid either decreases or increases or otherwise alters the activity of the protein or, in some manner, up- or down-regulates or otherwise alters expression of the nucleic acid in a cell.

[0236] As used herein, a pharmaceutical effect or therapeutic effect refers to an effect observed upon administration of an agent intended for treatment of a disease or disorder or for amelioration of the symptoms thereof.

[0237] As used herein, “modulate” and “modulation” or “alter” refer to a change of an activity of a molecule, such as a protein. Exemplary activities include, but are not limited to, biological activities, such as signal transduction. Modulation can include an increase in the activity (i.e., up-regulation or agonist activity) a decrease in activity (i.e., down-regulation or inhibition) or any other alteration in an activity (such as a change in periodicity, frequency, duration, kinetics or other parameter). Modulation can be context dependent and typically modulation is compared to a designated state, for example, the wildtype protein, the protein in a constitutive state, or the protein as expressed in a designated cell type or condition.

[0238] As used herein, inhibit and inhibition refer to a reduction in an activity relative to the uninhibited activity.

[0239] As used herein, a composition refers to any mixture. It can be a solution, suspension, liquid, powder, paste, aqueous, non-aqueous or any combination thereof.

[0240] As used herein, a combination refers to any association between or among two or more items. The combination can be two or more separate items, such as two compositions or two collections, can be a mixture thereof, such as a single mixture of the two or more items, or any variation thereof. The elements of a combination are generally functionally associated or related. A kit is a packaged combination that optionally includes instructions for use of the combination or elements thereof.

[0241] As used herein, “disease or disorder” refers to a pathological condition in an organism resulting from cause or condition including, but not limited to, infections, acquired conditions, genetic conditions, and characterized by identifiable symptoms. Diseases and disorders of interest herein are those involving complement activation, including those mediated by complement activation and those in which complement activation plays a role in the etiology or pathology. Diseases and disorders also include those that are caused by the absence of a protein such as an immune deficiency, and of interest herein are those disorders where complement activation does not occur due to a deficiency in a complement protein.

[0242] As used herein, “treating” a subject with a disease or condition means that the subject's symptoms are partially or totally alleviated, or remain static following treatment. Hence treatment encompasses prophylaxis, therapy and/or cure. Prophylaxis refers to prevention of a potential disease and/or a prevention of worsening of symptoms or progression of a disease. Treatment also encompasses any pharmaceutical use of a modified interferon and compositions provided herein.

[0243] As used herein, a therapeutic agent, therapeutic regimen, radioprotectant, or chemotherapeutic mean conventional drugs and drug therapies, including vaccines, which are known to those skilled in the art. Radiotherapeutic agents are well known in the art.

[0244] As used herein, treatment means any manner in which the symptoms of a condition, disorder or disease or other indication, are ameliorated or otherwise beneficially altered.

[0245] As used herein therapeutic effect means an effect resulting from treatment of a subject that alters, typically improves or ameliorates the symptoms of a disease or condition or that cures a disease or condition. A therapeutically effective amount refers to the amount of a composition, molecule or compound which results in a therapeutic effect following administration to a subject.

[0246] As used herein, the term “subject” refers to an animal, including a mammal, such as a human being.

[0247] As used herein, a patient refers to a human subject.

[0248] As used herein, amelioration of the symptoms of a particular disease or disorder by a treatment, such as by administration of a pharmaceutical composition or other therapeutic, refers to any lessening, whether permanent or temporary, lasting or transient, of the symptoms that can be attributed to or associated with administration of the composition or therapeutic.

[0249] As used herein, prevention or prophylaxis refers to methods in which the risk of developing disease or condition is reduced.

[0250] As used herein, an effective amount is the quantity of a therapeutic agent necessary for preventing, curing, ameliorating, arresting or partially arresting a symptom of a disease or disorder.

[0251] As used herein, administration of a protease, such as a modified protease, refers to any method in which the protease is contacted with its substrate.

[0252] Administration can be effected in vivo or ex vivo or in vitro. For example, for ex vivo administration a body fluid, such as blood, is removed from a subject and contacted outside the body with the modified non-complement protease. For in vivo administration, the modified protease can be introduced into the body, such as by local, topical, systemic and/or other route of introduction. In vitro administration encompasses methods, such as cell culture methods.

[0253] As used herein, unit dose form refers to physically discrete units suitable for human and animal subjects and packaged individually as is known in the art.

[0254] As used herein, a single dosage formulation refers to a formulation for direct administration.

[0255] As used herein, an “article of manufacture” is a product that is made and sold.

[0256] As used throughout this application, the term is intended to encompass modified protease polypeptides and nucleic acids contained in articles of packaging.

[0257] As used herein, fluid refers to any composition that can flow. Fluids thus encompass compositions that are in the form of semi-solids, pastes, solutions, aqueous mixtures, gels, lotions, creams and other such compositions.

[0258] As used herein, a “kit” refers to a combination of a modified protease polypeptide or nucleic acid molecule provided herein and another item for a purpose including, but not limited to, administration, diagnosis, and assessment of a biological activity or property. Kits optionally include instructions for use.

[0259] As used herein, a cellular extract or lysate refers to a preparation or fraction which is made from a lysed or disrupted cell.

[0260] As used herein, animal includes any animal, such as, but are not limited to primates including humans, gorillas and monkeys; rodents, such as mice and rats; fowl, such as chickens; ruminants, such as goats, cows, deer, sheep; ovine, such as pigs and other animals. Non-human animals exclude humans as the contemplated animal. The proteases provided herein are from any source, animal, plant, prokaryotic and fungal. Most proteases are of animal origin, including mammalian origin.

[0261] As used herein, a control refers to a sample that is substantially identical to the test sample, except that it is not treated with a test parameter, or, if it is a sample plasma sample, it can be from a normal volunteer not affected with the condition of interest. A control also can be an internal control.

[0262] As used herein, the singular forms “a,” “an” and “the” include plural referents unless the context clearly dictates otherwise. Thus, for example, reference to compound, comprising “an extracellular domain” “includes compounds with one or a plurality of extracellular domains.

[0263] As used herein, ranges and amounts can be expressed as “about” a particular value or range. About also includes the exact amount. Hence “about 5 bases” means “about 5 bases” and also “5 bases.”

[0264] As used herein, “optional” or “optionally” means that the subsequently described event or circumstance does or does not occur, and that the description includes instances where said event or circumstance occurs and instances where it does not. For example, an optionally substituted group means that the group is unsubstituted or is substituted.

[0265] As used herein, the abbreviations for any protective groups, amino acids and other compounds, are, unless indicated otherwise, in accord with their common usage, recognized abbreviations, or the IUPAC-IUB Commission on Biochemical Nomenclature (see, (1972) Biochem. 11:1726).

### B. METHOD FOR SCREENING PROTEASES

[0266] Provided are methods for screening for proteases with altered properties, particularly substrate specificity and selectivity. The methods also provide such altered proteases that exhibit substantially unchanged or with sufficient activity for a therapeutic use. The methods provided herein can be employed with any method for protease modification and design of modified proteases. Such methods include random methods for producing libraries, use of existing libraries, and also directed evolution methods

[0267] A variety of selection schemes to identify proteases having altered substrate specificity/selectivity have been employed, but each has limitations. The methods provided herein overcome such limitations. Generally, selection schemes include those that 1) select for protease binding or 2) select for protease catalysis. Examples of strategies that take advantage of protease binding include, for example, the use of transition state analogues (TSAs) and those that employ small molecule suicide substrates. A TSA is a stable compound that mimics the electronic and structural features of the transition state of a protease: substrate reaction. The strongest interaction between a protease and the substrate typically occurs at the transition state of a reaction. A TSA is employed as a model substrate to select for proteases with high binding affinity. A TSA is never a perfect mimic of a true transition state and their syntheses are difficult (Bertschinger et al. (2005) in Phage display in Biotech. and Drug Discovery (Sidhu S, ed), pp. 461-491). Such a strategy has identified protease variants with altered substrate specificity, but such proteases generally exhibit reduced activity because a requirement for protease catalysis is not part of the selection scheme.

[0268] In an alternate strategy, small molecule suicide substrates (also called mechanism-based inhibitors) have been used to select for proteases based on binding. Such suicide substrates typically are small molecule inhibitors that bind covalently to the active site of an enzyme. These suicide substrates contain a reactive electrophile that reacts with an enzymes nucleophile to form a covalent bond. Cleavage of a natural peptide bond by the protease is not required for this reaction. Typically, such inhibitors produce a reactive nucleophile only upon binding to the correct enzyme and undergoing normal catalytic steps (see, e.g., Bertschinger et al. (2005) in Phage display in Biotech. and Drug Discovery (Sidhu S, ed), pp. 461-491). In many cases, the substrate inhibitor mimics the conformation of the first transition state involved in catalysis, but do not allow completion of the catalytic cycle. As a result, the use of such inhibitors effectively selects for strong binding instead of catalysis and results in the selection of inactive enzymes with impaired dissociation of the substrate (Droge et al. (2006) Chem Bio Chem, 7:149-157). Also, due to their size and the lack of requirement for cleavage of the substrate, they do not recapitulate the interaction of a protease with a natural protein substrate.

[0269] A protease selection strategy that selects for catalysis instead of binding also has been attempted (see, e.g., Heinis et al. (2001), Protein Engineering, 14: 1043-1052). One of the major limitations in assaying for catalysis is that reaction products diffuse away quickly after the reaction is complete making it difficult to isolate the catalytically active enzyme. Consequently, strategies that select for catalysis rely on anchoring the substrate and the enzyme to phage such that they are in close proximity. For example, the protein calmodulin has been used as an immobilization agent (Demartis (1999) J. Mol. Biol., 286:617-633). Reaction substrates are non-covalently anchored on calmodulin-tagged phage enzymes using calmodulin-binding peptide derivatives. Following catalysis, phage displaying the reaction product are isolated from non-catalytically active phage using anti-product affinity reagents. Since the substrate is attached to the phage particle, however, the catalysis reaction can be hindered. Therefore, these and other methods for protease selection, suffer limitations and do not identify proteases with altered specificity and substantially unchanged with sufficient activity for therapeutic applications. The methods provided herein address these limitations.

[0270] Provided herein are method of protease selection to identify proteases and/or protease variants with altered, optimized or improved substrate specificity. Such proteases are identified for optimization and use as therapeutic proteases that can cleave and inactivate (or activate) desired protein targets such as, for example, protein targets involved in the etiology of a disease or disorder. In the methods for screening proteases provided herein, candidate proteases are trapped as stable intermediate complexes of the protease enzymatic reaction, and then identified. The stable intermediate complexes typically are covalent complexes or other complexes that permit separation thereof from non-complexed molecules. Such intermediates, include, for example, an acyl enzyme intermediate, that permits capture and ultimately identification of the proteases that have a selected or predetermined substrate specificity. Capture (trapping) of the protease is effected by contacting a collection of proteases with a protease trap polypeptide that is cleaved by the protease, and, upon cleavage, forms the stable complex. Exemplary of such protease trap polypeptides are serpins, alpha 2 macroglobulin, and other such molecules. The protease trap polypeptide can be naturally-occurring and/or can be modified to select for a particular target substrate.

[0271] In practicing the methods, collections of proteases, typically modified or mutant proteases and/or collections of natural proteases, are contacted with a protease trap polypeptide that reacts with the protease following substrate cleavage to form the complex containing the trapped intermediate. These methods can be used to identify proteases having a desired substrate specificity/selectivity. To achieve identification of proteases having a desired substrate specificity/selectivity, the amino acid sequence of the scissile bond, and/or surrounding sequences in the reactive site, such as the reactive loop sequence or analogous sequence, can be modified in the protease trap polypeptide to mimic the substrate cleavage sequence of a desired target substrate.

[0272] The screening reaction is performed by contacting a collection of proteases with the protease trap polypeptide under conditions whereby stable complexes, typically covalent complexes form. The complexes are of sufficient stability to permit their separation from other less stable complexes and unreacted protease trap polypeptides.

[0273] The protease trap polypeptides can be identifiable labeled or affinity-tagged to facilitate identification of complexes. For example, labeling of the protease trap polypeptides, such as by a fluorescent moiety, affinity tag or other such labeling/tagging agent facilitates the isolation of the protease-inhibitor complex and identification of the selected protease. Selected proteases can be analyzed for activity to assess proteolytic efficiency and substrate specificity. The identified or selected proteases also can be identified, such as by sequencing or other identification protocol, including mass spectrometric methods, or by other labeling methods, to identify selected proteases in the complexes.

[0274] The methods provided herein also include optional iterative screening steps, such that the method can be performed once, or can be performed in multiple rounds hone in on proteases of a desired or predetermined specificity/selectivity and/or cleavage activity. For example, proteases selection can include randomly or empirically or systematically modifying the selected protease (in targeted regions and/or along the length), and repeating (in one, two, three, four or more rounds) the method of contacting the proteases collection with one or more protease trap polypeptide.

[0275] The methods provided herein can be multiplexed, such as by including two or more differentially labeled or differentially identifiable protease trap polypeptides.

[0276] In the methods provided herein, it is not necessary that the protease trap polypeptide exhibit 100% or even very high efficiency in the complexing reaction as long as at least a detectable percentage, typically at least 1%, 2%, 5%, 10%, 20%, 30%, 40%, 50%, 60%, 70%, 80%, 90% or more, can form a stable complex that can be separated or otherwise identified from among less stable complexes or unreacted protease trap polypeptides. Thus, proteases can be selected where partitioning occurs in the reaction in which there is than 100% inhibition by the protease trap polypeptide, such as for example, 1%, 5%, 10%, 20%, 30%, 40%, 50%, 60%, 70%, 80% 90%, 95%, 99% or more inhibition of protease catalyzed reaction. In the methods provided herein, the stringency of the selection and other parameters can be modulated, such as by controlling reaction time, temperature, pH, ionic strength, and/or library and substrate concentrations. Specificity constraints also can be modulated during selection by including competitors such as, for example, specific competitors containing an undesired substrate cleavage sequence or broader classes of competitors, such as for example, human plasma.

[0277] The method provided herein also can be performed by contacting a collection of proteases with one protease trap polypeptide or mixtures of different protease trap polypeptides such as by multiplexing. Where a plurality of different protease trap polypeptides are used, each protease trap polypeptide can be individually and distinctly labeled so that they can be identifiably detected. Such a method enables the isolation and identification of multiple proteases from a collection of proteases in a single reaction.

[0278] The methods provided herein permit collections of proteases to be screened at once to identify those having a desired or predetermined substrate specificity. The collections of proteases include, any collection of proteases, including collections of various wild-type proteases, modified proteases, mixtures thereof, and also proteolytically active portions thereof. Any collection can be employed. The collections also can be made as a set of mutant proteases, or proteolytically active portions thereof that contain the mutation. Such collections include, combinatorial collections in which members in the collection contain diverse mutations. The mutation can be random along the length of a protease (or catalytically active portion thereof) or can be targeted to a particular position or region, such as for example, the specificity binding pocket of the protease. The methods provided herein can identify and discover non-contact residues not previously appreciated to be involved as specificity determinants (i.e. buried residues). Hence, the protease selection technology method provided herein can be used to create proteases with entirely new specificities and activities and/or to optimize the specificity or activity of an existing protease lead.

### C. PROTEASE TRAP POLYPEPTIDES

[0279] A protease trap polypeptide used in the methods provided herein is a polypeptide, or a polypeptide portion containing a reactive site, that serves as a substrate for a protease that upon cleavage results in the formation of a protease-substrate intermediate complex, that is stable. Generally, such a protease trap polypeptide is one that requires cleavage of a scissile bond (P1-P1′) by the protease to yield the generation of a trapped substrate-protease complex. The stable complex is typically an irreversible complex formed through the tight interactions between the protease and the protease trap polypeptide, such as due to covalent, ionic, hydrophobic, or other tight linkages. As such the complex is generally stable for hours, days, weeks, or more thereby permitting isolation of the complex. In one example, the stable intermediate complex can be an acyl enzyme intermediate that is formed upon reaction of a serine or cysteine protease with a protease trap polypeptide. Most usually, following protease trap polypeptide cleavage a rapid conformational change in the complex distorts the protease and prevents deacylation of the acyl-enzyme complex. Thus, panning proteases with protease trap polypeptides allows selection for the rate limiting step of catalysis (i.e. cleavage of the P1-P1′ bond and acylation of the enzyme) while at the same time forming very tight (i.e. covalent) complexes that are easily isolated from collection mixtures.

[0280] Typically, such protease trap polypeptides are large (greater than 100 amino acids), single domain proteins containing a reactive site sequence recognized by a protease. Generally, the reactive site cleavage sequence is part of a larger reactive loop that is flexible, exposed, and long to make it a target substrate (Otlewski et al. (2005) The EMBO J. 24: 1303-1310), however, so long as the protease trap contains a reactive site sequence that can be cleaved by a protease, thereby mimicking substrate cleavage, it can be used in the methods provided herein. Thus, any large polypeptide or synthetically produced polypeptide that contains a scissile bond cleaved by a protease resulting in the trapping of a protease in a long-lasting, stable complex can be used in the methods provided herein. Exemplary of such protease trap polypeptides are serpins, such as any described herein. Other protease trap polypeptides also can be used in the methods provided herein, such as any whose mechanism of action is similar to those of serpin molecules. These include, for example, synthetic or recombinantly generated serpin-like molecules, or polypeptides containing contiguous fragments or sequences of a serpin molecule including a sufficient portion of a reactive site loop of a serpin molecule. In addition, other protease inhibitors whose mechanism of inhibition is similar to that of serpins can be used, such as for example, the baculovirus p35 protein that inhibits caspases (Xu et al. (2001) Nature, 410:494-497; Otlewski et al. (2005) The EMBO J. 24: 1303-1310). Other protease trap polypeptides include any that trap a protease in a stable complex that can be easily isolated, such as, but not limited to, alpha 2 macroglobulin.

### 1. Serpins

### Structure, Function, and Expression

[0281] Serpins (serine protease inhibitors) are protease inhibitors that are large protein molecules (about 330-500 amino acids) compared to other serine protease inhibitors that are normally about less than 60 amino acids. The serpin superfamily is the largest and most broadly distributed of protease inhibitors. Over 1,500 serpin family members have been identified to date in a variety of different animals, poxviruses, plants, bacteria, and archaea (Law et al. (2006) Genome Biology, 7:216), with over thirty different human serpins studied thus far. Most human serpins are found in the blood where they function in a wide range of regulatory roles including, for example, inflammatory, complement, coagulation, and fibrinolytic cascades. Serpins also function intracellularly to perform cytoprotective roles, such as for example, regulating the inappropriate release of cytotoxic proteases. Although most serpins have an inhibitory role on protease activity, some serpins perform other non-inhibitory roles such as but not limited to, hormone transport, corticosteroid binding globulin, and blood pressure regulation (Silverman et al. (2001) JBC, 276: 33293-33296). Among non-inhibitory serpins are steroid binding globulins and ovalbumin. Typically, serpins inhibit the action of serine proteases, although several serpins have been identified that are inhibitors of papain-like cysteine proteases or caspases (Whisstock et al. (2005) FEBS Journal, 272: 4868-4873).

[0282] The sequence identity among serpin family members is weak, however, their structures are highly conserved. For example, members of the serpin family share about 30% amino acid sequence homology with the serpin alpha1-antitrypsin and have a conserved tertiary structure. Structurally, serpins are made up of three β sheets (A, B, and C) and 8-9 α-helices (A-I), which are organized into an upper β-barrel domain and a lower helical domain. The two domains are bridged by the five stranded B-sheet A, which is the main structural feature of serpins (Huntington et al. (2003), J Thrombosis and Haemostasis, 1:1535-1549). Serpins are metastable proteins such that they are only partially stable in their active form; they require protease to adopt a completely stable conformation. A loop, termed the reactive site loop (RSL), is responsible for the altered conformation of the serpin molecule. The RSL is an exposed stretch of about 17 amino acid residues that protrudes out from the top of the molecule in a region between the A and C β-sheets. The RSL serves as the protease recognition site, and generally contains the sole determinants of protease specificity. The most stable form of the serpin structure is the RSL-cleaved form. Following protease cleavage, the amino terminal portion of the RSL inserts into the center of β-sheet A to become strand four of the six-stranded β-sheet. This conformational change is termed the “stressed” to “relaxed” (or S to R) transition. This transformation is characterized by an increase in thermal stability of the molecule owing to the reorganization of the five-stranded β-sheet A to a six-stranded anti-parallel form (Lawrence et al. (2000), J. Biol. Chem., 275: 5839-5844). In other words, the native structure of serpins is equivalent to a latent intermediate, which is only converted to a more stable structure following protease cleavage (Law et al. (2006) Genome Biology, 7:216).

[0283] Typically, serpins target serine proteases, although some serpins inhibit cysteine proteases using a similar mechanism. The RSL loop determines which proteases are targeted for inhibition as it provides a pseudo-substrate for the target protease. In effect, the inhibitory specificity of a particular serpin is mediated by the RSL sequence, which is the most variable region among serpins (Travis et al. (1990) Biol. Chem. Hoppe Seyler, 371: 3-11). The RSL mimics the substrate recognition sequence of a protease and thereby contains a reactive site numbered as . . . Pₙ-P₃-P₂-P₁-P₁′-P₂′-P₃′-P′ₙ . . . , where the reactive site is the scissile bond between P₁ and P₁′. For mature α1-antitrypsin, cleavage at the P1-P1′ bond occurs at the Met₃₅₈-Ser₃₅₉ bond (corresponding to amino acids Met₃₈₂ and Ser₃₈₉ of the sequence of amino acids set forth in SEQ ID NO:1). The corresponding binding site for the residues on the protease are . . . Sₙ-S₃-S₂-S₁-S₁′, S₂′, S₃′, Sₙ′ . . . . In the method provided herein, modification of the RSL sequence is made to select for proteases from a display library exhibiting altered substrate specificity, as discussed in detail below.

### 2. Protease Catalysis, Inhibitory Mechanism of Serpins, and Formation of Acyl Enzyme Intermediate

[0284] The protease selection method provided herein exploits the ability of polypeptides to trap proteases, such as is exemplified by serpins, to identify proteases with altered substrate specificity. Mechanisms of protease catalysis differ slightly between classes of proteolytic enzymes: serine, cysteine, aspartic, threonine, or metallo-proteases. For example, serine peptidases have a serine residue involved in the active center, the aspartic have two aspartic acids in the catalytic center, cysteine-type peptidases have a cysteine residue, threonine-type peptidases have a threonine residue, and metallo-peptidases use a metal ion in the catalytic mechanism. Generally, those proteases families that form covalent intermediates are the target of the protease selection method provided herein. These include, for example, members of the serine and cysteine protease family. As an example, for serine proteases, the first step in catalysis is the formation of an acyl enzyme intermediate between the substrate and the serine in the catalytic center of the protease. Formation of this covalent intermediate proceeds through a negatively charged tetrahedral transition state intermediate and then the P1-P1′ peptide bond of the substrate is cleaved. During the second step or deacylation, the acyl-enzyme intermediate is hydrolyzed by a water molecule to release the peptide and to restore the Ser-hydroxyl of the enzyme. The deacylation, which also involves the formation of a tetrahedral transition state intermediate, proceeds through the reverse reaction pathway of acylation. For deacylation, a water molecule is the attacking nucleophile instead of the Ser residue. The H is residue in the catalytic center of a serine protease provides a general base and accepts the OH group of the reactive Ser.

[0285] Serpins inhibit the catalysis reaction of both serine and cysteine target proteases using the S to R transition as mentioned above. Their mechanism of action is unique among protease inhibitors by destroying the active site of the protease before deacylation progresses, thereby irreversibly impeding proteolysis following the formation of the acyl-enzyme intermediate (Otlewski et al. (2005) The EMBO Journal, 24: 1303). The kinetic model of the reaction of a serpin with a protease is identical to that of proteolysis of a substrate (see e.g., FIG. 1; Zhou et al. (2001) J. Biol. Chem., 276: 27541-27547). Following interaction with a target protease, the serpin initially forms a non-covalent Michaelis-like complex through interactions of residues in the RSL flanking the P1-P1′ scissile bond (Silverman et al. (2001), J. Biol. Chem., 276: 33293-33296). The serine residue (for serine proteases), in the active site of the protease attacks the P1-P1′ bond, facilitating cleavage of the peptide bond and formation of a covalent ester linkage between the serine residue and the backbone carbonyl of the P1 residue. After the RSL is cleaved, the RSL inserts into β-sheet A of the serpin molecule. The first residue to insert is P14 (i.e. amino acid 345 in mature α1-antitrypsin, which corresponds to amino acid position T369 in the sequence of amino acids set forth in SEQ ID NO: 1), and is followed by the flexible hinge region (P15-P9) of the RSL (Buck et al. (2005) Mol. Biol. Evol., 22: 1627-1634). Insertion of the RSL transports the covalently bound protease with it, resulting in a conformational change of the protease characterized by a distorted active site (see FIG. 1) as well as a transition of the serpin into a “relaxed” state. The conformational change of the protease alters the catalytic triad of the active site such that the P1 side chain is removed from the S1 pocket. The net result of the conformational rearrangements is trapping of the acyl enzyme intermediate (Silverman et al. (2001), J. Biol. Chem., 276: 33293-33296).

[0286] The formation of an acyl enzyme is important to the serpin interaction, and therefore, serpins are typically specific for classes of proteases that have acyl enzyme intermediates in catalysis. Among these classes of proteases are predominantly members of the serine protease family including those in the chymotrypsin superfamily and those in the subtilisin superfamily of proteases, which are described in more detail below. Additionally, serpins also are reactive against cysteine proteases including, for example, those in the papain family and the caspases family of serine proteases. Typically, serpins do not inhibit proteases of the metallo-, threonine, or aspartic families. For example, interactions of serpins with metalloproteases do not result in a covalent trapped intermediate, but instead the metalloprotease cleaves the inhibitor without the formation of any complex (Li et al. (2004) Cancer Res. 64: 8657-8665).

[0287] Thus, although most serpins inhibit serine proteases of the chymotrypsin family, cross-class inhibitors do exist that inhibit cysteine proteases. Among cross-class inhibitors are the viral serpin CrmA and PI9 (SEPRINB9) that both inhibit caspases 1, and SCCA1 (SERPINB3) that inhibits papain-like cysteine proteases including cathepsins L, K, and S. The mechanism of serpin-mediated inhibition of serine proteases appears to be adapted to cysteine proteases as well. The difference, however, is that the kinetically trapped intermediate is a thiol ester rather than an oxy ester as is the case for serine proteases (Silverman et al. (2001) J. Biol. Chem., 276:33293-33296). The existence of a stable, covalent thiol ester-type linkage is supported by the detection of an SDS-stable complex between SCCA1 and cathepsin S (Silverman et al. (2001) J. Biol. Chem., 276:33293-33296; Schick et al. (1998) Biochemistry, 37:5258-5266).

[0288] The serpin-protease pair is highly stable for weeks up to years depending on the serpin-protease pair, however, dissociation eventually will occur to yield the products of normal proteolysis (i.e. the cleaved serpin and the active protease; see e.g., Zhou et al. (2001) J. Biol. Chem., 276: 27541-27547). Further, if the RSL loop is not inserted fast enough into the protease, the reaction proceeds directly to the cleaved product. This phenomenon is termed partitioning and reflects the existence of a branched pathway that can occur leading to either a stable inhibitory complex or turnover of the serpin into a substrate such as is depicted in FIG. 1 as the formation of an inhibited complex versus the non-inhibitory pathway (Lawrence et al. (2000), J Biol. Chem., 275: 5839-5844). Partitioning of a serpin can be modulated by changing residues in the RSL loop, particularly in the hinge region of the RSL which initiates loop insertion (i.e. P14), or by altering the protease for which the serpin optimally interacts. For example, the inhibitory activity of the serpin plasminogen activator inhibitor-1 (PAI-1) differs between the proteases uPA, tPA, and thrombin, with a targeted preference for uPA and tPA. Further, variation of the RSL loop at, for example, the P14 position of the hinge region alters the targeted preference of PAI-1: mutation to charged amino acids (i.e. Arg, Lys, Asp, Glu) reduces the inhibitory activity of PAI-1 to each of uPA, tPA, and thrombin; mutation to neutral amino acids (i.e. His, Tyr, Gln, Asn) or to Gly which lacks a side chain results in a 10-100-fold reduced inhibitory activity of PAI-1 to tPA and thrombin as compared to uPA; and mutation to hydrophobic amino acids does not change the inhibitory activity of PAI-1 as compared to wildtype PAI-1 (Lawrence et al. (2000), J. Biol. Chem., 275: 5839-5844).

[0289] An important factor in the success of the serpin-mediated inhibition of protease catalysis is the length of the RSL loop, which must be of a precise length to ensure that the serpin and protease interact in a way that provides leverage between the body of the serpin and protease to allow for displacement of the catalytic serine from the active site and deformation of the protease (Zhou et al. (2001) J. Biol. Chem., 276: 27541-27547; Huntington et al. (2000) Nature, 407:923-926). In effect, the protease is crushed against the body of the serpin. Most serpins have an RSL that is 17 residues in length, while only a few have been identified with loops of 16 residues (i.e. α2-antiplasmin, C1-inhibitor, and CrmA). An α2-antiplasmin variant serpin having an 18 residue loop also has been identified from a patient with a bleeding disorder, although this variant is not a functional inhibitory serpin (Zhou et al. (2001) J. Biol. Chem., 276: 27541-27547). Thus, the serpin inhibitory mechanism can accommodate a shortening, but not a lengthening, of the RSL (Zhou et al. (2001) J. Biol. Chem., 276: 27541-27547). In addition to a conservation of loop length among serpin family members, the RSLs of serpins also generally retain a conserved hinge region (P15-P9) composition and do not typically contain charged or bulky P residues.

[0290] a. Exemplary Serpins

[0291] Serpins used in the method provided herein can be any serpin polypeptide, including but not limited to, recombinantly produced polypeptides, synthetically produced polypeptides and serpins extracted from cells, tissues, and blood. Serpins also include allelic variants and polypeptides from different species including, but not limited to, animals of human and non-human origin, poxviruses, plants, bacteria, and archaea. Typically, an allelic or species variant of a serpin differs from a native or wildtype serpin by about or at least 40%, 50%, 60%, 70%, 80%, 90%, 91%, 92%, 93%, 94%, 95%, 96%, 97%, 98%, or 99%. Human serpins include any serpin provided herein (e.g., in Table 2 below), allelic variant isoforms, synthetic molecules from nucleic acids, proteins isolated from human tissues, cells, or blood, and modified forms of any human serpin polypeptide. Serpins also include truncated polypeptide fragments so long as a sufficient portion of the RSL loop is present to mediate interaction with a protease and formation of a covalent acyl enzyme intermediate.

TABLE 2
Exemplary Serpins

| | | | | | | Mature | |
|---|---|---|---|---|---|---|---|
| | | | | | | Poly- | SEQ |
| | | | Nick- | | | peptide | ID |
| | Serpin | Protein name | name | Function | Acc. # | (aa) | NO |
| Extra- | SERPINA1 | Alpha-1- | AIAT | Inhibits elastase | P01009 | 25-418 | 1 |
| cellular | | antitrypsin | | | | | |
| inhibitory | | | | | | | |
| Serpins | | | | | | | |
| | SERPINA2 | Alpha-1- | A1AU | May be a | P20848 | 22-420 | 2 |
| | | antitrypsin- | | pseudogene | | | |
| | | related protein | | | | | |
| | SERPINF2 | Alpha-2- | A2AP | Inhibits plasmin | P08697 | 40-491 | 3 |
| | | antiplasmin | | and trypsin | | | |
| | SERPINA3 | Alpha-1- | AACT | Inhibits | P01011 | 24-423 | 4 |
| | | antichymotrypsin | | neutrophil | | | |
| | | | | cathepsin G and | | | |
| | | | | mast cell | | | |
| | | | | cymase | | | |
| | SERPINC1 | Antithrombin- | ANT3 | Regulates blood | P01008 | 33-464 | 5 |
| | | III | | coagulation | | | |
| | | | | cascade; | | | |
| | | | | thrombin and | | | |
| | | | | factor Xa | | | |
| | | | | inhibitor | | | |
| | SERPIND1 | Heparin cofactor | HEP2 | Regulates blood | P05546 | 20-499 | 6 |
| | | II | | coagulation | | | |
| | | | | cascade; | | | |
| | | | | thrombin | | | |
| | | | | inhibitor | | | |
| | SERPING1 | Plasma protease | IC1 | Regulation of | P05155 | 23-500 | 7 |
| | | C1 inhibitor | | complement | | | |
| | | | | activation, | | | |
| | | | | blood | | | |
| | | | | coagulation, | | | |
| | | | | fibrinolysis and | | | |
| | | | | the generation | | | |
| | | | | of kinins; C1 | | | |
| | | | | esterase | | | |
| | | | | inhibitor | | | |
| | SERPINA5 | Plasma serine | IPSP, | Inhibits | P05154 | 20-406 | 8 |
| | | protease | PAI-3 | activated | | | |
| | | inhibitor, Protein | | protein C and | | | |
| | | C inhibitor | | plasminogen | | | |
| | | | | activators | | | |
| | SERPINA4 | Kallistatin | KAIN, | Inhibits | P29622 | 21-427 | 9 |
| | | | PI4 | amidolytic and | | | |
| | | | | kininogenase | | | |
| | | | | activities of | | | |
| | | | | human tissue | | | |
| | | | | kallikrein | | | |
| | SERPINII | Neuroserpin | NEUS, | Formation or | Q99574 | 17-410 | 10 |
| | | | PII2 | reorganization | | | |
| | | | | of synaptic | | | |
| | | | | connections and | | | |
| | | | | synaptic | | | |
| | | | | plasticity; | | | |
| | | | | inhibitor of tPA, | | | |
| | | | | uPA, and | | | |
| | | | | plasmin | | | |
| | SERPINE1 | Plasminogen | PAI1 | Regulation of | P05121 | 24-402 | 11 |
| | | activator | | fibrinolysis; | | | |
| | | inhibitor-1 | | inhibitor of | | | |
| | | | | thrombin, uPA, | | | |
| | | | | tPA, and | | | |
| | | | | plasmin | | | |
| | SERPIN12 | Myoepithelium- | PII4 | Inhibition of | O75830 | 19-405 | 12 |
| | | derived serine | | cancer | | | |
| | | proteinase | | metastasis | | | |
| | | inhibitor | | | | | |
| | SERPINA10 | Protein Z- | ZP1 | Inhibits factor Z | Q9UK55 | 22-444 | 13 |
| | | dependent | | and XI | | | |
| | | protease | | | | | |
| | | inhibitor | | | | | |
| | SERPINE2 | Protease nexin I, | PI7, | Inhibition of | P07093 | 20-398 | 14 |
| | | glia-derived | GDN, | uPA and tPA | | | |
| | | nexin precursor | PN-1 | | | | |
| Intra- | SERPINB1 | Leukocyte | ILEU | Inhibition of | P30740 | 1-379 | 15 |
| cellular | | elastase | | neutrophil | | | |
| inhibitory | | inhibitor, | | protease | | | |
| Serpins | | monocytes | | | | | |
| | | neutrophil | | | | | |
| | | elastase inhibitor | | | | | |
| | SERPINB2 | Plasminogen | PAI2 | Tissue-type | P05120 | 1-415 | 16 |
| | | activator | | plasminogen | | | |
| | | inhibitor-2 | | activator, | | | |
| | | | | intracellular | | | |
| | | | | signaling; | | | |
| | | | | inhibition of | | | |
| | | | | uPA | | | |
| | SERPINB6 | Placental | PTI6 | Inhibits | P35237 | 1-376 | 17 |
| | | thrombin | | thrombin | | | |
| | | inhibitor | | | | | |
| | SERPINB10 | Bomapin | SB10, | Haematopoiesis, | P48595 | 1-397 | 18 |
| | | | P110 | inhibition of | | | |
| | | | | thrombin and | | | |
| | | | | trypsin | | | |
| | SERPINB11 | epipin | SB11 | | Q96P15 | 1-392 | 19 |
| | SERPINB12 | Yukopin | SB12 | Inhibits trypsin | Q96P63 | 1-405 | 20 |
| | | | | and plasmin | | | |
| | SERPINB13 | Headpin | SB13, | Proliferation or | Q9UIV8 | 1-391 | 21 |
| | | | P113 | differentiation | | | |
| | | | | of | | | |
| | | | | keratinocytes, | | | |
| | | | | inhibition of | | | |
| | | | | cathepsins L | | | |
| | | | | and K | | | |
| | SERPINB3 | Squamous cell | SCC1 | Modulates | P29508 | 1-390 | 22 |
| | | carcinoma | | immune | | | |
| | | antigen 1 | | response | | | |
| | | | | towards tumors, | | | |
| | | | | inhibition of | | | |
| | | | | cathepsins L, K, | | | |
| | | | | S and V, and | | | |
| | | | | papain | | | |
| | SERPINB4 | Squamous cell | SCC2 | Modulates | P48594 | 1-390 | 23 |
| | | carcinoma | | immune | | | |
| | | antigen 2 | | response | | | |
| | | | | towards tumors, | | | |
| | | | | inhibition of | | | |
| | | | | Cathepsin G | | | |
| | | | | and chymase | | | |
| | SERPINB7 | Megsin | SPB7 | Maturation of | O75635 | 1-390 | 24 |
| | | | | megakaryocytes | | | |
| | SERPINB8 | Cytoplasmic | SPB8, | Inhibition of | P50452 | 1-374 | 25 |
| | | antiproteinase 8 | PI8 | Furin | | | |
| | SERPINB9 | Cytoplasmic | SPB9, | Granzyme B | P50453 | 1-376 | 26 |
| | | antiproteinase 9 | PI9 | inhibitor | | | |
| | SERPINB6 | Proteinase | PI6, | Inhibition of | P35237 | 1-376 | 27 |
| | | inhibitor-6, | PTI | cathepsin G, | | | |
| | | placental | | inhibits | | | |
| | | thrombin | | thrombin | | | |
| | | inhibitor | | | | | |
| Non- | SERPINA8 | Angiotensinogen | ANGT | Blood pressure | P01019 | 34-485 | 28 |
| inhibitory | | | | regulation, | | | |
| serpins | | | | hormone | | | |
| | | | | precursor | | | |
| | SERPINA6 | Corticosteroid- | CBG | Hormone | P08185 | 23-405 | 29 |
| | | binding globulin | | carrier | | | |
| | | | | (glucocorticoids | | | |
| | | | | and progestins), | | | |
| | | | | cortisol binding | | | |
| | SERPINH1 | 47 kDa heat | HS47 | Molecular | P29043 | 18-417 | 30 |
| | | shock protein | | chaperone for | | | |
| | | | | collagen | | | |
| | SERPINF1 | Pigment | PEDF | Induces | P36955 | 20-418 | 31 |
| | | epithelium- | | neuronal | | | |
| | | derived factor | | differentiation | | | |
| | | | | in | | | |
| | | | | retinoblastoma | | | |
| | | | | cells; inhibitor | | | |
| | | | | of angiogenesis | | | |
| | SERPINB5 | Maspin | MASP | Tumor | P36952 | 1-375 | 32 |
| | | | | suppressor, | | | |
| | | | | prevents | | | |
| | | | | metastasis | | | |
| | SERPINH2 | Collagen- | SIH2 | Molecular | P50454 | 19-418 | 33 |
| | | binding protein 2 | | chaperone for | | | |
| | | | | collagen | | | |
| | SERPINA7 | Thyroxine- | THBG | Thyroid | P05543 | 21-415 | 34 |
| | | binding protein | | hormone | | | |
| | | | | transport, | | | |
| | | | | thyroxine | | | |
| | | | | binding | | | |
| | SERPINA9 | Germinal center | GCET1 | Maintenance of | Q86WD7 | 24-417 | 35 |
| | | B-cell expressed | | naive B cells | | | |
| | | transcript 1 | | | | | |
| | | protein | | | | | |
| | SERPINA12 | Vaspin | | Insulin- | Q8IW75 | 21-414 | 36 |
| | | | | sensitizing | | | |
| | | | | adipocytokine | | | |
| | SERPINA11 | | | | Q86U17 | 20-422 | 37 |
| | SERPINA13 | | | | Q6UXR4 | 22-307 | 38 |

[0292] Typically, a serpin used in the method provided herein is an inhibitory serpin, or fragment thereof, capable of forming a covalent acyl enzyme intermediate between the serpin and protease. Generally, such a serpin is used to select for proteases normally targeted by the serpin where close to complete inhibition of the protease occurs and partitioning is minimized between the inhibitory complex and cleaved serpin substrate. Table 3 depicts examples of serine proteases and their cognate serpin inhibitors. Such serpin/protease pairs are expected to have a high association constant or second ordered rate constant of inhibition and low or no partitioning into a non-inhibitory complex. For example, the major physiological inhibitor of t-PA is the serpin PAI-1, a glycoprotein of approximately 50 kD (Pannekoek et al. (1986) EMBO J., 5:2539-2544; Ginsberg et al., (1980) J. Clin. Invest., 78:1673-1680; and Carrell et al. In: Proteinase Inhibitors, Ed. Barrett, A. J. et al., Elsevier, Amsterdam, pages 403-420 (1986). Other serpin/protease pairs also can be used in the methods provided herein, however, even where association constants are lower and partitioning is higher. For example, although the association constants of other serpins, such as C1 esterase inhibitor and alpha-2-antiplasmin with tPA are orders of magnitude lower than that of PAI-1 (Ranby et al. (1982) Throm. Res., 27:175-183; Hekman et al. (1988) Arch. Biochem. Biophys., 262:199-210), these serpins nevertheless inhibit tPA (see e.g., Lucore et al. (1988) Circ. 77:660-669).

TABLE 3

| Serine Protease | Cognate Serpin Inhibitor |
|---|---|
| Activated protein C | Protein C inhibitor |
| | PAI-1 |
| C1 esterase | C1 esterase inhibitor |
| Cathepsin G | Alpha-1-antitrypsin |
| | Alpa-1-antichymotrypsin |
| Chymase | Alpha-1-antichymotrypsin |
| Chymotrypsin | Alpha-1-antichymotrypsin |
| | Alpha-2-antiplasmin |
| | Contrapsin |
| Coagulation Factors | Antithrombin III |
| (VIIa, Xa, XIa, XIIa) | C1 esterase inhibitor |
| Elastase | Alpha-1-antitrypsin |
| Kallikrein | C1 esterase inhibitor |
| | Alpha-1-antitrypsin |
| Plasmin | Alpha-2-antiplasmin |
| Thrombin | Antithrombin III |
| | Heparin cofactor II |
| tPA | PAI-1, PAI-2, PAI-3 |
| Trypsin | Alpha-1-antitrypsin |
| | Growth hormone regulated protein |
| Trypsin-like protease | Protease nexin I |
| u-PA | PAI-1, PAI-2, PAI-3 |

[0293] Thus, generally a serpin used for selection of a protease in the methods provided herein yields a reaction product where 80%, 90%, 93%, 94%, 95%, 96%, 97%, 98%, 99%, or 100% of the reaction product is the formation of the inhibitory complex. In some cases, however, increased partitioning between a serpin and protease can occur in the methods provided herein, such as if the serpin used in the method does not optimally target the protease. Thus, in the method provided herein a serpin can be used to select a protease where the resulting reaction leads to at or about 20%, 30%, 40%, 50%, 60%, 70%, 75%, or more of a stable inhibitory complex and the remaining product is a cleaved serpin substrate. Factors that can be altered to optimize for protease selection where partitioning occurs include, for example, increased serpin concentration and increased reaction time. In some instances, other non-inhibitory serpins, or mutants thereof as discussed below, can be used in the methods provided herein so long as the target protease for selection is able to interact with the serpin substrate to yield a covalent inhibitory complex that can be captured.

[0294] i. PAI-1

[0295] Exemplary of serpins used in the protease selection methods is plasminogen activator inhibitor-1 (PAI-1), or variants thereof. PAI-1 is the main inhibitor of tissue plasminogen activator (t-PA) and urokinase or urinary-plasminogen activator (u-PA), which are proteases involved in fibrinolysis due to the activation of plasminogen. PAI-1 has a second order rate constant for t-PA and u-PA of about 2×10⁷ M⁻¹ s⁻¹. PAI-1 is involved in tumor invasion, fibrinolysis, cell migration, tissue remodeling, tissue involution, ovulation, inflammation, trophoblast invasion, and malignant transformation (Salonen et al. (1988) J. Biol. Chem., 264: 6339-6343). PAI-1 is mainly produced by the endothelium, but also is secreted by other tissue types, such as for example, adipose tissue. Other related plasminogen activator inhibitors include PAI-2 and PAI-3. PAI-2, for example, also is an inhibitor of u-PA and t-PA, but is secreted by the placenta and typically is only present in high amounts during pregnancy.

[0296] PAI-1 is a single chain glycoprotein having a precursor sequence set forth in SEQ ID NO:11, including a 23 amino acid signal sequence, which when cleaved results in a 379 amino acid mature sequence. Like other serpins, PAI-1 transitions from a latent form into an active form following cleavage by a protease at its P1-P1′ reactive site located at Arg³⁴⁶-Met³⁴⁷ (i.e. corresponding to amino acids Arg³⁶⁹ and Met³⁷⁰ of a precursor sequence set forth in SEQ ID NO:11), thereby resulting in the formation of a stable covalent complex and the inactivation of the bound protease. Unlike other serpins, however, PAI-1 adopts a latent transition spontaneously resulting in an inactive, highly stable but covalently intact form whereby residues P15 to P4 of the RSL insert into the β-sheet A to form strand four of the β-sheet (i.e. s4A), and residues P3 to P10′ form an extended loop at the surface of the molecule (De Taeye et al. (2003) J. Biol. Chem., 278: 23899-23905). Thus, active PAI-1 is relatively unstable at 37° C. exhibiting a half-life of only 2.5 hours before spontaneous conversion to a latent conformation. This latent form, however, can be re-activated by denaturation, such as by denaturation with sodium dodecyl sulfate, guanidinium chloride, and urea (Declerek et al. (1992) J. Biol. Chem., 267: 11693-11696) and heat (Katagiri et al. (1988) Eur J. Biochem., 176: 81-87). The active form of PAI-1 also is stabilized by interaction with vitronectin. Mutant PAI-1 have been identified that are unable to undergo conversion to a latent conformation and are therefore more stable at elevated temperature and pH for extended times periods (see e.g., Berkenpas et al. (1995) The EMBO J., 14:2969-2977).

[0297] Modifications of serine proteases (i.e. t-PA or u-PA) and/or of the inhibitory serpin (i.e. PAI-1) have been made to modulate or alter the secondary rate constants of inhibition so as to make proteases resistant to inhibition by their cognate serpin inhibitor, or variant thereof, such as for use in therapeutic applications where activity of the wild-type protease is desired (see e.g., U.S. Pat. Nos. 5,866,413; 5,728,564; 5,550,042; 5,486602; 5,304,482).

[0298] ii. Antithrombin (AT3)

[0299] Another exemplary serpin, or variant thereof, for use in the methods herein is antithrombin (AT3). AT3 also is a member of the serpin family and inactivates a number of enzymes, including for example, those from the coagulation system such as, but not limited to, Factor X, Factor IX, Factor II (thrombin), Factor VII, Factor XI, and Factor XII. Typically, antithrombin is predominantly found in the blood where it, for example, prevents or inhibits coagulation by blocking the function of thrombin. The activity of AT3 is increased by the presence of one or more cofactors, typically heparin. Upon interaction with heparin, AT3 undergoes a conformational rearrangement involving loop expulsion away from serpin structure and P1 exposure resulting in an AT3 structure having an exposed protease-accessible conformation. In addition, heparin can bind to both the protease and inhibitor thereby accelerating the inhibitory mechanism (Law et al. (2006) Genome Biology, 7(216): 1-11).

[0300] The gene sequence for AT3 codes for a seven exon spanning DNA, encoding a precursor protein set forth in SEQ ID NO:5. Cleavage of the signal sequence corresponding to amino acids 1-32 of the sequence set forth in SEQ ID NO:5 results in a mature protein of 432 amino acids that has a molecular weight of about 58,000 daltons. Six of the amino acids are cysteines, which results in the formation of three intramolecular disulfide bonds. The P4-P2′ positions in the RSL of AT3 contain the amino acid residues IAGRSL (SEQ ID NO:478), which correspond to amino acids 422-427 in the sequence of amino acids set forth in SEQ ID NO:5, where cleavage at the reactive site P1-P1′ occurs between amino acids Arg⁴²⁵-Ser⁴²⁶.

### 3. Other Protease Trap Polypeptides

[0301] Additional protease trap polypeptides are known in the art or can be identified that exhibit a mechanism of inhibition similar to serpins (e.g. cleavage of the target substrate by a protease that produces a stable intermediate and a conformational change in the structure of the protease). Such protease trap polypeptides are contemplated for use in the method provided herein. Exemplary of such a protease trap polypeptide is p35. In addition, any other molecule that is cleaved by a protease resulting in the trapping of a protease in a long-lasting, stable complex can be used in the methods provided herein.

[0302] a. p35

[0303] For example, the baculovirus p35 protein (SEQ ID NO: 473), which is a broad spectrum caspase inhibitor, can inhibit caspases in this manner (Xu et al. (2001) Nature 410:494-497; Xu et al. (2003) J. Biol. Chem. 278(7):5455-5461). Cleavage of the P₁-P₁′ bond of p35 (at the caspase cleavage site DQMD⁸⁷) by caspases produces a covalent thioester intermediate between the amino segment of p35 loop (Asp87) and the cysteine residue of the caspase catalytic triad (Cys350 in caspase-8). Upon formation of the thioester linkage, the protease undergoes a conformational change allowing the amino segment of the cleaved loop to bury into the caspase, while the N-terminus of p35 containing a Cys residue at position 2 inserts into the caspase active site, thus blocking solvent accessibility of His 317 residue in caspase-8. Inaccessibility to the hydrolytic water molecule thus prevents subsequent hydrolysis of thioester bond.

[0304] Similar viral caspase inhibitors in addition to p35 include, but are not limited to, p49 (SEQ ID NO: 491) and the serpin CrmA cowpox gene (SEQ ID NO: 492). The p49 inhibitor exhibits a caspase inhibition mechanism similar to that of p35 in that a stable thioester linkage is formed with the active site of the caspase upon cleavage of the p49 caspase recognition sequence TVTD⁹⁴.

[0305] Target substrates for the screening using the methods provided herein can include a viral caspase inhibitor polypeptide, such as a p35, p49 or CrmA polypeptide. Methods of modification of the RSL loop of serpins provided herein can be easily adapted to modification of viral caspase inhibitor polypeptides. For example, the target site for cleavage in the p35 RSL can be modified to so as to select for proteases that have an altered reactivity or specificity for a target substrate. In wild-type p35, caspase recognition is found at amino acid positions 84-87 (DQMD⁸⁷). Modifications to viral caspase inhibitor polypeptides can thus include modifications that alter the cleavage sequence and/or surrounding amino acid residues. For example, such modified caspase inhibitor polypeptides, such as for example a p35, p49 or CrmA polypeptide, can be designed to mimic the cleavage sequence of a desired target substrate, such as for example, a target substrate involved in the etiology of a disease or disorder. Any modification in the RSL loop sequence of a viral caspase inhibitor polypeptide can be made in the methods provided herein.

[0306] Viral caspase inhibitor polypeptides such as a p35, p49 or CrmA polypeptide, used in the methods provided herein can be any viral caspase inhibitor polypeptide, including but not limited to, recombinantly produced polypeptides, synthetically produced polypeptides and p35 pr p49 polypeptide produced by baculovirus purification methods. Viral caspase inhibitor polypeptides also include allelic variants of polypeptides, such as p35, p49 or CrmA polypeptide variants.

[0307] b. Alpha Macroglobulins (aM)

[0308] The alpha macroglobulin (aM) family of proteases include protease inhibitors such as the exemplary protease inhibitor alpha-2-macroglobulin (a2M; SEQ ID NO:490), and are contemplated for use as protease traps in the methods provided herein. aM molecules inhibit all classes of proteases. aM protease traps are characterized by a similar inhibition mechanism involving cleavage of a bait region of the inhibitor by a protease. The bait region is a segment that is susceptible to proteolytic cleavage, and which, upon cleavage, initiates a conformational change in the aM molecule resulting in the collapse of the structure around the protease. For the exemplary a2M sequence set forth in SEQ ID NO:490, the bait region corresponds to amino acids 690-728. In the resulting aM-protease stable complex, the active site of the protease is sterically shielded, thereby decreasing access to normal protease substrates. Typically, the trapped protease remains active against small peptide substrates, but loses its ability to interact with large protein substrates or inhibitors. In addition, aM molecules are characterized by the presence of a reactive thiol ester, which inactivates the inhibitory capacity by reaction of the thiol ester with amines. Further, the conformational change that occurs upon cleavage of the bait region exposes a conserved COOH-terminal receptor binding domain (RBD). Exposure of the RBD sequence facilitates the removal of the aM-protease complex from circulation.

### 4. Protease Trap Competitors

[0309] Competitors can be used in the methods provided herein to modulate the specificity and selectivity constraints of a selected protease for a target substrate. The competitors can be contacted with the protease, or collections thereof, at any time, such as before or after contact of the protease with the desired protease trap polypeptide or the competitor and desired protease trap polypeptide can be contacted with the protease simultaneously. Competitors can be specific competitors or broad competitors.

[0310] Specific competitors are designed that mimic a predetermined non-target substrate and thereby act as predetermined potential off-targets. Typically, such competitors are not labeled, so that stable protease complexes that form are not selected for. In addition, such competitors are added in large excess, typically molar excess, over the designed protease trap polypeptide used in the selection scheme, such that the competitors bind up the undesired proteases in the collection. In one example of specific competition, two different protease trap polypeptides, each designed to mimic different substrate recognition, are contacted with a collection of proteases where only one of the protease trap polypeptides is detectably labeled. For example, a competitor can include a polypeptide protease trap that is designed to have its reactive site mimic the cleavage sequence of a non-target substrate. Thus, a competitor, such as a serpin, can be designed to have its P4-P1′ RSL residues replaced by the cleavage sequence of a predetermined non-target substrate. The competitor can be used in methods in combination with a protease trap polypeptide, such as for example another serpin polypeptide, whose RSL sequence has been modified to contain amino acids in the P4-P1′ positions that mimic the cleavage sequence of a desired or predetermined target substrate, and that is labeled for isolation thereof. Thus, both protease trap polypeptides select for proteases exhibiting selectivity for the target or non-target cleavage sequence, but only those stable protease complexes that exhibit the desired target substrate specificity and that are detectably labeled can be isolated from the reaction. Other examples of specific competitors include, for example, the native protease trap polypeptide for which the reactive site has been modified in the methods provided herein. Example 6 exemplifies such a strategy where a plasma purified AT3 serpin is used as a competitor against the modified serpin AT3^{SLGR-KI}.

[0311] Broad competitors also can be used in the methods provided herein to constrain the specificity and selectivity of selected proteases. Examples of broad competitors include, for example, human plasma or human serum which contains a variety of natural protease inhibitors. Alternatively, a broad small molecule library of protease trap polypeptides can be generated where every position of P2, P3, or P4 is made to be different, such as for example an Acxxx-Thiaphine library.

### 5. Variant Protease Trap Polypeptides

[0312] Protease trap polypeptides that have been modified in their reactive site to have an altered cleavage sequence can be used in the methods provided herein to select for proteases with a desired or predetermined target substrate. Thus, protease traps are modified in the region of their sequence that serves as the recognized cleavage site of a protease so as to select for proteases that have an altered reactivity or specificity for a target substrate. For example, serpins can be modified to have an altered cleavage sequence at or around the scissile bond in the RSL loop. In another example, a2M can be modified in its bait region to have an altered cleavage sequence. Such modified protease traps can be designed to mimic the cleavage sequence of a desired target substrate, such as for example, a target substrate involved in the etiology of a disease or disorder.

[0313] Any modification in the RSL loop sequence of a serpin molecule can be made in the methods provided herein. Alignments of RSL sequences of exemplary wild-type serpins are set forth in Table 4 below. In the Table below, the numbers designating the P15 to P5′ positions are with respect to a mature a 1′-antitrypsin molecule (corresponding to amino acids 367-387 of the sequence of amino acids set forth in SEQ ID NO:1). The identity of the RSL loop sequences are known to those of skill in the art and/or can be determined by alignments such as by alignment with serpins as set forth in Table 4 below.

TABLE 4
RSL LOOP SEQUENCE ALIGNMENT*

| | | SEQ ID |
|---|---|---|
| SERPIN | RSL loop sequence | NO |
| Manduca sexta serpin 1B | ₃₄₃P₁₅ P₁₀ P₄ P₁P₁ P₅′₃₆₃ | 397 |
| | EGAEAAAANAFGIVPKSLILY | |
| Manduca sexta serpin 1K | EGAEAAAANAFKITTYSFHFV | 398 |
| α1-antichymotrypsin | EGTEASAATAVKITLLSALVE | 399 |
| Antithrombin-III | EGSEAAASTAVVIAGRSLNPN | 400 |
| PAI-II | EGTEAAAGTGGVMTGRTGHGG | 401 |
| α1-antitrypsin | KGTEAAGAMFLEAIPMSIPPE | 402 |
| PAI-I | SGTVASSSTAVIVSARMAPEE | 403 |
| PAI-III | SGTRAAAATGTIFTFRSARLN | 404 |
| Ovalbumin | AGREVVGSAEAGVDAASVSEE | 405 |

* adapted from Ye et al. (2001) Nature Structural Biology 8: 979

[0314] Thus, amino acid sequences within the RSL loop of a serpin corresponding to any one or more of amino acids in the reactive site of a serpin (i.e. any one or more of amino acids corresponding to P15 to P5′ positions such as set forth, for example, in Table 4 above) can be modified. Typically, amino acids that are part of the hinge region of the RSL loop sequence are not modified (i.e. amino acids corresponding to P15-P9 positions). In one example, one or more amino acid in the P1 and/or P1′ position are modified corresponding to those amino acids that flank the scissile bond. In another example, any one or more amino acids corresponding to reactive site positions P4-P2′ are modified. For example, the P4-P1′ of PAI-1 is VSARM (SEQ ID NO:378), where cleavage occurs between the R (P1) and M (P1′) amino acids. Modification of any or more of amino acids of the VSARM sequence can be made to modify the cleavage sequence of PAI-1 to select for proteases with altered specificity. Example 1 exemplifies modification of PAI-1 where the VSARM sequence in the reactive site loop is modified to be RRARM (SEQ ID NO:379). In another example, the reactive site loop the VSARM sequence can be modified to the known efficient peptide substrate PFGRS (SEQ ID NO:389). Exemplary of such mutant PAI-1 are set forth in SEQ ID NOS:610 and 611.

[0315] In another example, modifications can be made in the RSL of antithrombin III (AT3). For example, the P4-P1′ of AT3 is IAGRSL (SEQ ID NO:478), where cleavage occurs between the R (P1) and S (P1′) amino acids. Modification of any one or more of amino acids of the IAGRSL sequence can be made to modify the cleavage sequence of AT3 to select for proteases with altered specificity. Examples 6 and 7 exemplify modification of AT3 where the IAGRSL sequence in the reactive site loop is modified to be RRVRKE (SEQ ID NO:498). In another example, the IAGRSL amino acid sequence in the reactive site loop can be modified to SLGRKI (SEQ ID NO:479). Other modified AT3 polypeptides were made containing replacement of the IAGRSL amino acid sequence with the amino acid sequence SKGRSL (SEQ ID NO:501) or the amino acid sequence PRFKII (SEQ ID NO: 503). Exemplary of such mutant AT3 molecules are set forth in any of SEQ ID NOS:497, 499, 500, and 502.

[0316] Alternatively, and if necessary, the modification in any one or more amino acid positions P4-P2′ can be made one at a time, two at a time, three at a time, etc., and the resulting modified serpin can be separately tested in successive rounds of selection so as to optimize for proteases that exhibit substrate specificity and/or selectivity at each of the modified positions.

[0317] In most cases, amino acid residues that replace amino acid residues in the reactive site loop of a wild-type serpin, or analogous sequence in another protease trap, are chosen based on cleavage sequences in a desired target substrate. A target substrate protein is one that is normally involved in a pathology, where cleaving the target protein at a given substrate sequence serves as a treatment for the pathology (see e.g. U.S. patent publication No. US 2004/0146938, US2006/0024289, US2006/0002916, and provisional application Ser. No. 60/729,817). For example, the target protein can be one involved in rheumatoid arthritis (i.e. TNFR), sepsis (i.e. protein C), tumorigenicity (i.e. a growth factor receptor, such as a VEGFR), or inflammation (i.e. a complement protein). A target substrate also can be a viral protein such that upon cleavage of the viral protein the viruses would be unable to infect cells. Table 5 below sets forth exemplary target substrates.

TABLE 5
Exemplary Target Substrates

| Target | Indication | Molecule Class |
|---|---|---|
| IL-5/IL-5R | Asthma | Cytokine |
| IL-1/IL-1R | Asthma, inflammation, | Cytokine |
| | Rheumatic disorders | |
| IL-13/IL-13R | Asthma | Cytokine |
| IL-12/IL-12R | Immunological disorders | Cytokine |
| IL-4/IL-4R | Asthma | Cytokine |
| TNF/TNFR | Asthma, Crohn's disease, HIV | Cytokine |
| | infection, inflammation, | |
| | psoriasis, rheumatoid arthritis, | |
| | inflammatory bowel disease | |
| CCR5/CXCR4 | HIV infection | GPCR |
| gp120/gp41 | HIV infection | Fusion protein |
| CD4 | HIV infection | Immune Receptor |
| Hemaglutinin | Influenza infection | Fusion Protein |
| RSV fusion protein | RSV infection | Fusion Protein |
| B7/CD28 | Graft-v-host disorder, | Immune Receptor |
| | rheumatoid arthritis, transplant | |
| | rejection, diabetes mellitus | |
| IgE/IgER | Graft-v-host disorder, transplant | Antibody receptor |
| | rejection | |
| CD2, CD3, CD4, | Graft-v-host disorder, transplant | Immune Receptor |
| CD40 | rejection, psoriasis | |
| IL-2/IL-2R | Autoimmune disorders, graft-v- | Cytokine |
| | host disorders, rheumatoid | |
| | arthritis | |
| VEGF, FGF, EGF, | Cancer | Growth Factor |
| TGF | | |
| HER2/Neu | Cancer (i.e. breast cancer) | Growth Factor |
| | | Receptor |
| CCR1 | Multiple sclerosis | GPCR |
| CXCR3 | Multiple sclerosis, rheumatoid | GPCR |
| | arthritis | |
| CCR2 | Atherosclerosis, rheumatoid | GPCR |
| | arthritis | |
| Src | Cancer, osteoporosis | Kinase |
| Akt | Cancer | Kinase |
| Bcl-2 | Cancer | Protein-protein |
| BCR-Abl | Cancer | Kinase |
| GSK-3 | Diabetes | Kinase |
| Cdk-2/cdk-4 | Cancer | Kinase |
| EGFR | Lung, breast, bladder, prostate, | |
| | colorectal, kidney, head &neck | |
| | cancer | |
| VEGFR-1, | neck cancer | Growth Factor |
| VEGFR-2 | | Receptor |
| Complement | Inflammatory diseases | Immune |
| | | molecules |

[0318] Cleavage sites within target proteins are known or can be easily identified. Cleavage sites within target proteins are identified by the following criteria: 1) they are located on the exposed surface of the protein; 2) they are located in regions that are devoid of secondary structure (i.e. not in P sheets of helices), as determined by atomic structure of structure prediction algorithms (these regions tend to be loops on the surface of proteins or stalk on cell surface receptors); 3) they are located at sites that are likely to inactive (or activate) the protein, based on its known function. Cleavage sequences are e.g., four residues in length (i.e. P1-P4 positions) to match the extended substrate specificity of proteases, but can be longer or shorter. For example, the P4-P1 amino acid residues for a cleavage sequence in complement factor C2 is SLGR (SEQ ID NO:431), but also can be represented as the P4-P2′ sequence of SLGRKI (SEQ ID NO:479), where cleavage occurs between the P1 and P1′ position (i.e. between R/K). Hence, any one or more residues within a cleavage sequence, including any one or more of residues P4-P2′, including P4-P1, can be introduced into a protease trap polypeptide, such as in the RSL of a serpin to generate a mutant protease trap polypeptide.

[0319] Cleavage sequences can be identified in a target substrate by any method known in the art (see e.g., published U.S. Application No. US 2004/0146938). In one example, cleavage of a target substrate is determined by incubating the target substrate with any protease known to cleave the substrate. Following incubation with the protease, the target protein can be separated by SDS-PAGE and degradative products can be identified by staining with a protein dye such as Coomassie Brilliant Blue. Proteolytic fragments can be sequenced to determine the identity of the cleavage sequences, for example, the 6 amino acid P4-P2′ cleavage sequence, and in particular, the four amino acid P4-P1 cleavage sequence residues. Table 6 identifies cleavage sequences corresponding to positions P4-P1 for exemplary target substrates.

TABLE 6
Cleavage Sequence for Exemplary Target Substrates
(P4-P1 residues)

| Target | Cleavage sequence |
|---|---|
| TNF-α | AEAK (406) |
| TNF-R1 | ENVK (407); GTED (408) |
| TNF-R2 | SPTR (409); VSTR (410); STSF (411) |
| HER-2 | KFPD (412); AEQR (413) |
| EGFR | KYAD (414); NGPK (415) |
| VEGFR-1 | SSAY (416); GTSD (417) |
| VEGFR-2 | AQEK (418); RIDY (419); VLKD (480); |
| | LVED (481); WFKD (482); RIYD (483); |
| | KVGR (484); RVRK (485); RKTK (486); |
| | KTKK (487); TKKR (488); RRVR (489) |
| C3 | REFK (420); GLAR (421); RLGR (422); |
| | AEGK (423); QHAR (424); LPSR (425); |
| | SLLR (426); LGLA (427); LSVV (428) |
| C4 | HRGR (429) |
| C2 | GATR (430); SLGR (431); VFAK (432) |

[0320] Hence, modification of an RSL of a serpin, or analogous sequence in other protease traps, can be modified to any desired or predetermined cleavage sequence of a target substrate. In one example, the selected cleavage sequence can be one that is a particularly efficient cleavage sequence of t-PA. Such a cleavage sequence is, for example, PFGRS (SEQ ID NO:389; see e.g., Ding et al. (1995) PNAS, 92:7627-7631). Thus, for example, a protease can be selected for that has an altered substrate specificity that is made to replicate the substrate specificity of t-PA. Since t-PA is an often used therapeutic for the treatment of fibrinolytic disorders, such a selected protease can be optimized to be an alternative t-PA therapeutic, while minimizing undesirable side effects often associated with t-PA therapies (i.e. excessive bleeding).

[0321] In another example, a cleavage sequence for a complement protein can be targeted as a predetermined or desired cleavage sequence for selection of a protease using the methods provided herein. A protease selected to have increased substrate specificity against any one or more complement proteins would be a therapeutic candidate for treatment of disorders and diseases associated with inflammation such as, but not limited to, autoimmune diseases, such as rheumatoid arthritis and lupus, cardiac disorders, and other inflammatory disorders such as sepsis and ischemia-reperfusion injury (see e.g., provisional application Ser. No. 60/729,817). Example 6 to Examples 15 exemplify selection of an MT-SP 1 protease against an AT3 serpin molecule modified by replacements of its native P4-P2′ residues IAGRSL (SEQ ID NO:478) with a cleavage sequence of the C2 complement proteins (i.e. SLGRKI, SEQ ID NO:479). Modification or replacement of amino acid residues by the SLGRKI cleavage sequence, or intermediates thereof such as are described below, can be made in any protease trap polypeptide, such as any serpin polypeptide, for selection of any candidate protease as so desired.

[0322] In an additional example, a cleavage sequence can be selected in a VEGFR, such as in the stalk region of a VEGFR, such that the VEGFR is inactivated upon cleavage by a protease having specificity for the cleavage sequence. Examples of cleavage sequences in a VEGFR are described herein and set forth in related published U.S. application serial Nos. US20060024289 and US20060002916. For example, the RSL of a serpin, or analogous sequence in other protease traps such as the “bait” region in alpha-2 macroglobulin, can be modified to have any one or more of amino acid positions P4-P2′ replaced with the cleavage sequence of a VEGFR. In one example, amino acid residues in a native serpin can be modified to contain the P4-P1 positions corresponding to the RRVR (SEQ ID NO:489) cleavage sequence, or the entire P4-P2′ sequence RRVRKE (SEQ ID NO:498). A protease selected against such a modified serpin would be a candidate to treat VEGFR-mediated disorders, such as for example, angiogenic disorders.

[0323] In some cases, in the methods provided herein, the modifications in any one or more of the P4-P2′ positions of a serpin RSL, or analogous sequence in other protease traps, can be made in successive rounds to optimize for selection of proteases with a desired or predetermined substrate specificity. For example, both u-PA and t-PA proteases prefer small amino acids at the P2 position and very different amino acids in the P3 and P4 positions. Thus, modified serpins can be generated that are intermediates for the final target cleavage sequence, where a first intermediate is generated by modification of only the P3 and P4 positions to select for proteases that exhibit specificity at the P3 and P4 positions. The selected protease or proteases can then be used as a template for the generation of a new combinatorial library against a new serpin molecule modified to additionally have the P2 position changed.

[0324] Thus, in selection, for example, of a u-PA protease, or variant thereof, that exhibits increased substrate specificity for the VEGFR cleavage sequence RRVR, the first round of selection can be made against an intermediate modified protease trap polypeptide, such as a serpin, where only the P3 and P4 positions are changed as compared to the native sequence at those positions. For example, where the native P4-P1′ amino acids in the RSL loop of the serpin PAI-1 are VSARM, a modified intermediate PAI-1 can be made by replacement of only the P4 and P3 VEGFR cleavage sequence, to yield the intermediate serpin molecule containing RRARM (SEQ ID NO:379) in the P4-P1′ positions. Subsequent rounds of protease selection can be made against a PAI-1 serpin that has additionally been modified at the P2 position.

[0325] Protease traps, including serpins, can be modified using any method known in the art for modification of proteins. Such methods include site-directed mutagenesis, including single or multi-sited directed mutagenesis. Likewise, expression and purification of protease-trap polypeptides, including variant protease-trap polypeptides can be performed using methods standard in the art for expression and purification of polypeptides. Any host cell system can be used for expression, including, but not limited to, mammalian cells, bacterial cells or insect cells. Further, the protease trap polypeptides can be modified further to include additional sequences that aid in the identification and purification of the protease trap polypeptide. For example, epitope tags, such as but not limited to, His tags or Flag tags, can be added to aid in the affinity purification of the polypeptide. In some examples, protease trap polypeptides are directly biotinylated to aid in capture and/or purification. An exemplary method for biotinylating a protease-trap polypeptide is described in Example 16.

[0326] Assays, such as assays for biological function of a serpin molecule or other protease trap are known in the art and can be used to assess the activity of a modified protease trap as an inhibitor in the methods provided herein. Such assays are dependent on the protease trap polypeptide modified for use in the methods herein. Exemplary of such assays for PAI-1 include, for example, active site titration against standard trypsin or titration of standard trypsin such as are exemplified in Example 1. Also exemplary of such assays are protease inhibition assays, which are known in the art, whereby the ability of the protease trap to inhibit the cleavage of a fluorogenic substrate by an active protease is used as a readout for protease trap activity. Exemplary of a protease inhibition assay is a matriptase (MT-S P1) inhibition assay. In one example of such an assay, the protease trap is a serpin. In a specific example, the serpin is AT3 or a variant AT3 protein made according to the methods provided herein, the fluorogenic substrate is RQAR-ACC. Cleavage of the substrate is measured, for example, as exemplified in Example 14A. Thrombin inhibition assays also can be used to assess the activity of AT3, or modified AT3. Similar assays can be designed or are known to one of skill in the art depending on the cognate protease for which a protease trap polypeptide, or variant thereof, normally interacts. Further, it is expected and often is the case that a modified protease trap polypeptide will have reduced activity as compared to a wild-type protease trap polypeptide in normal assays of protease trap activity or function.

### D. PROTEASES

[0327] In the methods provided herein, candidate proteases are selected for that exhibit an altered substrate specificity, typically for a predetermined or desired substrate. Collections of proteases, mutant protease, or catalytically active portions thereof are contacted with a protease trap polypeptide, such as any provided herein including, for example, serpins or modified serpins, to select for proteases with altered substrate specificity. The protease collections can be provided on a solid support or in a homogenous mixture such as in solution or suspension. The selected proteases can be isolated as stable complexes with the protease trap polypeptide, and can be identified. Selected proteases display increased catalytic efficiency and reactivity against the desired or predetermined target substrate, and are thereby candidates for use as therapeutics, such as in any disease or disorder for which the target substrate is involved.

### 1. Candidate Proteases

[0328] In the method provided herein, proteases are selected for that have an altered and/or increased specificity for a desired substrate that is involved in a disease or disorder. Generally, proteases are highly specific proteins that hydrolyze target substrates while leaving others intact. For the cleavage of natural substrates, proteases exhibit a high degree of selectivity such that substrate cleavage is favored, whereas non-substrate cleavage is disfavored (Coombs et al. (1996) J. Biol. Chem., 271: 4461-4467). Selecting for proteases with an altered specificity and selectivity for a desired target substrate would enable the use of proteases as therapeutics to selectively activate or inactivate proteins to reduce, ameliorate, or prevent a disease or disorder. Target proteases used in the protease trap selection method provided herein can be any known class of protease capable of peptide bond hydrolysis for which the protease trap interacts. Typically, for serpins, such proteases are generally serine or cysteine proteases for which serpins react with to form a covalent intermediate complex. Exemplary of serine and cysteine proteases are any protease set forth in Table 7 below. Typically, a library of modified proteases are used in the methods provided herein to select for a protease variant that exhibits an increased specificity or selectivity for a target protease trap, or variant thereof, such as a serpin, or variant thereof.

[0329] Exemplary proteases that can be used, and/or modified to be used, in the selection method provided herein are described, and include truncated polypeptides thereof that include a catalytically active portion. Exemplary candidate proteases are listed in Table 7 and described herein (see e.g., www.merops.sanger.ac.uk). The sequence identifiers (SEQ ID NO) for the nucleotide sequence and encoded amino acid precursor sequence for each of the exemplary candidate proteases is depicted in the Table. The encoded amino acids corresponding to the signal peptide or propeptide sequence to yield a mature protein also are noted in the Table. In addition, amino acids designating the protease domain (i.e. peptidase unit) also are noted, as are the active site residues that make up, for example, the catalytic triad of the respective protease. Since interactions are dynamic, amino acid positions noted are for reference and exemplification. The noted positions reflects a range of loci that vary by 2, 3, 4, 5 or more amino acids. Variations also exist among allelic variants and species variants. Those of skill in the art can identify corresponding sequences by visual comparison or other comparisons including readily available algorithms and software.

[0330] Candidate proteases for selection typically are wild-type or modified or variant forms of a wildtype candidate protease, or catalytically active portion thereof, including allelic variant and isoforms of any one protein. A candidate protease can be produced or isolated by any method known in the art including isolation from natural sources, isolation of recombinantly produced proteins in cells, tissues and organisms, and by recombinant methods and by methods including in silico steps, synthetic methods and any methods known to those of skill in the art. Modification of a candidate protease for selection can be by any method known to one of skill in the art, such as any method described herein below.

TABLE 7
Exemplary Candidate Proteases

| | | | | | | | | Peptidase |
|---|---|---|---|---|---|---|---|---|
| | | | | Nt. | | A.A. | | unit |
| | | | | SEQ | A.A. | SEQ | Signal/ | (active |
| Protease | Merops | | Nt. ACC. | ID | ACC. | ID | propeptide | site |
| Type | Code | Name | NO: | NO: | NO: | NO: | sequence | residues) |
| Serine | S01.010 | granzyme B, | M17016 | 39 | P10144 | 40 | 1-18/19-20 | 21-247 |
| Protease: | | human-type | | | | | | (64, 108, |
| Chymotrypsin | | | | | | | | 203) |
| family | S01.011 | Testisin | NM_006799 | 41 | NP_006790 | 42 | 1-19/20-41 | 42-288 |
| | | | (v1) | | | | | (82, 137, |
| | | | NM_144956 | 43 | NP_659205 | 44 | | 238) |
| | | | (v2) | | | | | |
| | | | NM_144957 | 45 | NP_659206 | 46 | | |
| | | | (v3) | | | | | |
| | S01.015 | trypstase beta 1 | NM_003294 | 47 | NP_003285 | 48 | 1-18/19-30 | 31-274 |
| | | (Homo sapiens) | | | | | | (74, 121, |
| | | (III) | | | | | | 224) |
| | S01.017 | kallikrein hk5 | NM_012427 | 49 | NP_036559 | 50 | 1-22/ | 67-292 |
| | | | | | | | | (108, 153, |
| | | | | | | | | 245) |
| | S01.019 | Corin | NM_006587 | 51 | NP_006578 | 52 | | 802-1037 |
| | | | | | | | | (843, 892, |
| | | | | | | | | 985) |
| | S01.020 | kallikrein 12 | NM_019598 | 53 | NP_062544 | 54 | 1-17/ | 22-248 |
| | | | (v1) | | | | | (843, 892, |
| | | | NM_145894 | 55 | NP_665901 | 56 | | 985) |
| | | | (v2) | | | | | |
| | | | NM_145895 | 57 | NP_665902 | 58 | | |
| | | | (v3) | | | | | |
| | S01.021 | DESC1 oritease | AF064819 | 59 | AAF04328 | 60 | | 191-422 |
| | | | | | | | | (231, 276, |
| | | | | | | | | 372) |
| | S01.028 | tryptase gamma 1 | NM_012467 | 61 | NP_036599 | 62 | 1-19/ | 38-272 |
| | | | | | | | | (78, 125, |
| | | | | | | | | 222) |
| | S01.029 | kallikrein hK14 | NM_022046 | 63 | Q9P0G3 | 64 | 1-18/19-24 | 25-249 |
| | | | | | | | | (67, 111, |
| | | | | | | | | 204) |
| | S01.033 | hyaluronan- | NM_004132 | 65 | NP_004123 | 66 | 1-23/ | 314-557 |
| | | binding serine | | | | | | (362, 411, |
| | | protease (HGF | | | | | | 509) |
| | | activator-like | | | | | | |
| | | protein) | | | | | | |
| | S01.034 | transmembreane | NM_019894 | 67 | NP_063947 | 68 | | 205-436 |
| | | protease, | NM_183247 | 69 | NP_899070 | 70 | | (245, 290, |
| | | serine 4 | | | | | | 387) |
| | S01.054 | tryptase delta 1 | NM_012217 | 71 | Q9BZJ3 | 72 | 1-18/19-30 | 31-235 |
| | | (Homo sapiens) | | | | | | (74, 121, |
| | | | | | | | | 224) |
| | S01.074 | Marapsin | NM_031948 | 73 | NP_114154 | 74 | 1-22/23-34 | 35-279 |
| | | | | | | | | (75, 124, |
| | | | | | | | | 229) |
| | S01.075 | Tryptase | BC036846 | 75 | AAN04055 | 76 | | 37-281 |
| | | homologue 2 | | | | | | (77, 126, |
| | | (Homo sapiens) | | | | | | 231) |
| | S01.076 | Tryptase | Putative | 77 | | 78 | | 67-304 |
| | | homologue 3 | Only | | | | | (107, 213, |
| | | (Homo sapiens) | AC005570 | | | | | 259) |
| | | | (Cosmid | | | | | |
| | | | 407D8) | | | | | |
| | S01.079 | transmembrane | NM_024022 | 79 | NP_076927 | 80 | | 217-451 |
| | | protease, serine 3 | (vA) | | | | | (257, 304, |
| | | | NM_032401 | 81 | NP_115777 | 82 | | 401) |
| | | | (vB) | | | | | |
| | | | NM_032404 | 83 | NP_115780 | 84 | | |
| | | | (vC) | | | | | |
| | | | NM_032405 | 85 | NP_115781 | 86 | | |
| | | | (vD) | | | | | |
| | S01.081 | kallikrein hK15 | NM_023006 | 87 | NP_075382 | 88 | 1-16/17-21 | 22-256 |
| | | (Homo sapiens) | (v1) | | | | | (62, 106, |
| | | | NM_138563 | 89 | NP_612630 | 90 | | 209) |
| | | | (v2) | | | | | |
| | | | NM_138564 | 91 | NP_612631 | 92 | | |
| | | | (v3) | | | | | |
| | | | NM_017509 | 93 | NP_059979 | 94 | | |
| | | | (v4) | | | | | |
| | S01.085 | Mername- | BC035384 | 95 | AAH35384 | 96 | | 1-241 |
| | | AA031 | | | | | | (56, 101, |
| | | peptidase | | | | | | 195) |
| | | (deduced from | | | | | | |
| | | ESTs by | | | | | | |
| | | MEROPS) | | | | | | |
| | S01.087 | membrane-type | AB048796 | 97 | BAB39741 | 98 | | 321-556 |
| | | mosaic serine | | | | | | (361, 409, |
| | | protease | | | | | | 506) |
| | S01.088 | mername- | Putative | | CAC12709 | 99 | | 10-142 |
| | | AA038 | Only | | | | | (50, 101) |
| | | peptidase | AL136097 | | | | | |
| | | | (RP11-62C3 | | | | | |
| | | | clone) | | | | | |
| | S01.098 | mername- | Putative | 100 | AAH41609 | 101 | | 33-202 |
| | | AA128 | Only | | | | | (50, 152) |
| | | peptidase | BC041609 | | | | | |
| | | (deduced from | | | | | | |
| | | ESTs by | | | | | | |
| | | MEROPS) | | | | | | |
| | S01.127 | cationic trypsin | NM_002769 | 102 | NP_002760 | 103 | 1-15/16-23 | 24-246 |
| | | (Homo sapiens- | | | | | | (63, 107, |
| | | type 1) | | | | | | 200) |
| | | (cationic) | | | | | | |
| | S01.131 | Neutrophils | NM_001972 | 104 | NP_001963 | 105 | 1-27/28-29 | 30-249 |
| | | elastase | | | | | | (70, 117, |
| | | | | | | | | 202) |
| | S01.132 | mannan-binding | AF284421 | 106 | AAK84071 | 107 | 1-19/ | 449-710 |
| | | lectin- | | | | | | (497, 553, |
| | | associated | | | | | | 664) |
| | | serine protease-3 | | | | | | |
| | S01.133 | cathepsin G | NM_001911 | 108 | NP_001902 | 109 | 1-18/19-20 | 21-245 |
| | | | | | | | | (64, 108, |
| | | | | | | | | 201) |
| | S01.134 | myeloblastin | NM_002777 | 110 | NP_002768 | 111 | 1-25/26-27 | 28-250 |
| | | (proteinase 3) | | | | | | (71, 118, |
| | | | | | | | | 203) |
| | S01.135 | granzyme A | NM_006144 | 112 | NP_006135 | 113 | 1-26/27-28 | 29-261 |
| | | (CTLA3) | | | | | | (69, 114, |
| | | | | | | | | 212) |
| | S01.139 | granzyme M | NM_005317 | 114 | NP_005308 | 115 | 1-23/24-25 | 26-256 |
| | | | | | | | | (66, 111, |
| | | | | | | | | 207) |
| | S01.140 | chymase | NM_001836 | 116 | NP_001827 | 117 | 1-19/21-21 | 22-247 |
| | | (human-type) | | | | | | (66, 110, |
| | | | | | | | | 203) |
| | S01.143 | tryptase alpha | NM_003294 | 118 | NP_003285 | 119 | 1-18/19-30 | 31-274 |
| | | (1) | | | | | | (74, 121, |
| | | | | | | | | 224) |
| | S01.146 | granzyme K | NM_002104 | 120 | NP_002095 | 121 | 1-24/26-26 | 27-261 |
| | | | | | | | | (67, 116, |
| | | | | | | | | 214) |
| | S01.147 | granzyme H | NM_033423 | 122 | NP_219491 | 123 | 1-18/19-20 | 21-246 |
| | | (CTLA1) | | | | | | (64, 108, |
| | | | | | | | | 202) |
| | S01.152 | chymotrypsin B | M24400 | 124 | P17538 | 125 | 1-18 | 34-263 |
| | | | | | | | | (75, 120, |
| | | | | | | | | 213) |
| | S01.153 | pancreatic | NM_001971 | 126 | NP_001962 | 127 | 1-8/9-18 | 19-256 |
| | | elastase | | | | | | (63, 111, |
| | | | | | | | | 206) |
| | S01.154 | pancreatic | NM_005747 | 128 | NP_005738 | 129 | 1-15/16-28 | 29-270 |
| | | endopeptidase E | | | | | | (73, 123, |
| | | (A) | | | | | | 217) |
| | S01.155 | pancreatic | M16652 | 130 | AAA52380 | 131 | 1-16/7-28 | 29-269 |
| | | elastase II (IIA) | | | | | | (73, 121, |
| | | | | | | | | 216) |
| | S01.156 | Enteropeptidase | NM_002772 | 132 | NP_002763 | 133 | | 785-1019 |
| | | | | | | | | (825, 876, |
| | | | | | | | | 971) |
| | S01.157 | chymotrypsin C | NM_007272 | 134 | NP_009203 | 135 | 1-16/17-29 | 30-268 |
| | | | | | | | | (74, 121, |
| | | | | | | | | 216) |
| | S01.159 | Prostasin | NM_002773 | 136 | NP_002764 | 137 | 1-29/30-32 | 45-288 |
| | | | | | | | | (85, 134, |
| | | | | | | | | 238) |
| | S01.160 | kallikrein 1 | NM_002257 | 138 | NP_002248 | 139 | 1-18/19-24 | 25-261 |
| | | | | | | | | (65, 120, |
| | | | | | | | | 214) |
| | SO1.161 | kallikrein hK2 | NM_005551 | 140 | NP_005542 | 141 | 1-18/19-24 | 25-260 |
| | | (Homo sapiens) | (v1) | | | | | (65, 120, |
| | | | NM_001002231 | 142 | NP_001002231 | 143 | | 213) |
| | | | (v2) | | | | | |
| | | | NM_001002232 | 144 | NP_001002232 | 145 | | |
| | | | (v3) | | | | | |
| | S01.162 | kallikrein 3 | NM_001648 | 146 | NP_001639 | 147 | 1-17/18-24 | 25-260 |
| | | | (v1) | | (v1) | | | (65, 120, |
| | | | NM_001030047 | 148 | NP_001025218 | 149 | | 213) |
| | | | (v3) | | (v3) | | | |
| | | | NM_001030048 | 150 | NP_001025219 | 151 | | |
| | | | (v4) | | (v4) | | | |
| | | | NM_001030049 | 152 | NP_001025220 | 153 | | |
| | | | (v5) | | (v5) | | | |
| | | | NM_001030050 | 154 | NP_001025221 | 155 | | |
| | | | (v6) | | (v6) | | | |
| | S01.174 | Mesotrypsin | NM_002771 | 156 | NP_002762 | 157 | 1-24/ | 24-246 |
| | | | | | | | | (63, 107, |
| | | | | | | | | 200) |
| | S01.205 | pancreatic | NM_007352 | 158 | NP_031378 | 159 | 1-15/16-28 | 29-270 |
| | | endopeptidase E | | | | | | (73, 123, |
| | | form B (B) | | | | | | 217) |
| | S01.206 | pancreatic | NM_015849 | 160 | NP_056933 | 161 | 1-16/17-28 | 29-269 |
| | | elastase II form | | | | | | (73, 121, |
| | | B (Homos | | | | | | 216) |
| | | sapiens) (IIB) | | | | | | |
| | S01.211 | coagulation | NM_000505 | 162 | NP_000496 | 163 | 1-19/ | 373-615 |
| | | factor XIIa | | | | | | (412, 461, |
| | | | | | | | | 563) |
| | S01.212 | plasma | NM_000892 | 164 | NP_000883 | 165 | 1-19/ | 391-628 |
| | | kallikrein | | | | | | (434, 483, |
| | | (KLK3) | | | | | | 578) |
| | S01.213 | coagulation | NM_000128 | 166 | NP_000119 | 167 | 1-18/ | 388-625 |
| | | factor XIa | (v1) | | (v1) | | | (431, 480, |
| | | (HAF) | NM_019559 | 168 | NP_062505 | 169 | | 575) |
| | | | (v2) | | (v2) | | | |
| | S01.214 | coagulation | NM_000133 | 170 | NP_000124 | 171 | 1-28/29-46 | 227-461 |
| | | factor IXa | | | | | | (267, 315, |
| | | | | | | | | 411) |
| | S01.215 | coagulation | NM_000131 | 172 | NP_000122 | 173 | 1-20/21-60 | 213-454 |
| | | factor VIIa | (v1) | | (v1) | | | (253, 302, |
| | | | NM_019616 | 174 | NP_062562 | 175 | | 404) |
| | | | (v2) | | (v2) | | | |
| | S01.216 | coagulation | NM_000504 | 176 | NP_000495 | 177 | 1-31/32-40 | 235-469 |
| | | factor Xa | | | | | | (276, 322, |
| | | | | | | | | 419) |
| | S01.217 | Thrombin | NM_000506 | 178 | NP_000497 | 179 | 1-24/25-43 | 364-620 |
| | | | | | | | | (406, 462, |
| | | | | | | | | 568) |
| | S01.218 | protein C | NM_000312 | 180 | NP_000303 | 181 | 1-32/33-42 | 212-452 |
| | | (activated) | | | | | | (253, 299, |
| | | | | | | | | 402) |
| | S01.223 | Acrosin | NM_001097 | 182 | NP_001088 | 183 | 1-19 | 43-292 |
| | | | | | | | | (88, 142, |
| | | | | | | | | 240) |
| | S01.224 | Hepsin | NM_182983 | 184 | NP_892028 | 185 | | 163-407 |
| | | | (v1) | | | | | (203, 257, |
| | | | NM_002151 | 186 | NP_002142 | 187 | | 353) |
| | | | (v2) | | | | | |
| | S01.228 | hepatocyte | NM_001528 | 188 | NP_001519 | 189 | 1-35/36-372 | 408-648 |
| | | growth factor | | | | | | (447, 497, |
| | | activator | | | | | | 598) |
| | | (HGFA) | | | | | | |
| | S01.231 | u-plasminogen | NM_002658 | 190 | NP_002649 | 191 | 1-20/ | 179-426 |
| | | activator (uPA) | | | | | | (224, 275, |
| | | | | | | | | 376) |
| | S01.232 | t-plasminogen | NM_000930 | 192 | NP_000921 | 193 | 1-23/24-32 | 311-562 |
| | | activator (tPA) | (v1) | | (v1) | | and 33-35 | (357, 406, |
| | | | NM_000931 | 194 | NP_000922 | 195 | | 513) |
| | | | (v2) | | (v2) | | | |
| | | | NM_033011 | 196 | NP_127509 | 197 | | |
| | | | (v3) | | (v3) | | | |
| | S01.233 | Plasmin | NM_000301 | 198 | NP_000292 | 199 | 1-19/20-97 | 581-810 |
| | | | | | | | | (622, 665, |
| | | | | | | | | 760) |
| | S01.236 | Neurosin | NM_002774 | 200 | NP_002765 | 201 | 1-16/17-21 | 22-244 |
| | | | (vA) | | | | | (62, 106, |
| | | | NM_001012964 | 202 | NP_001012982 | 203 | | 197) |
| | | | (vB) | | | | | |
| | | | NM_001012965 | 204 | NP_001012983 | 205 | | |
| | | | (vC) | | | | | |
| | | | NM_001012966 | 206 | NP_001012984 | 207 | | |
| | | | (vD) | | | | | |
| | S01.237 | Neurotrypsin | NM_003619 | 208 | NP_003610 | 209 | 1-20/ | 631-875 |
| | | | | | | | | (676, 726, |
| | | | | | | | | 825) |
| | S01.242 | tryptase beta 2 | NM_024164 | 210 | NP_077078 | 211 | 1-30/ | 31-268 |
| | | (Homo sapiens) | | | | | | |
| | | (I) | | | | | | |
| | S01.244 | Neuropsin | NM_007196 | 212 | NP_009127 | 213 | 1-28/29-32 | 33-258 |
| | | | (v1) | | (v1) | | | (73, 120, |
| | | | NM_144505 | 214 | NP_653088 | 215 | | 212) |
| | | | (v2) | | (v2) | | | |
| | | | NM_144506 | 216 | NP_653089 | 217 | | |
| | | | (v3) | | (v3) | | | |
| | | | NM_144507 | 218 | NP_653090 | 219 | | |
| | | | (v4) | | (v4) | | | |
| | S01.246 | kallikrein hK10 | NM_002776 | 220 | NP_002767 | 221 | 1-30/ | 35-276 |
| | | (Homo sapiens) | (v1) | | | | | (86, 137, |
| | | | NM_145888 | 222 | NP_665895 | 223 | | 229) |
| | | | (v2) | | | | | |
| | S01.247 | Epitheliasin | NM_005656 | 224 | NP_005647 | 225 | | 256-491 |
| | | | | | | | | (296, 345, |
| | | | | | | | | 441) |
| | S01.251 | Prostase | NM_004917 | 226 | NP_004908 | 227 | 1-26/27-30 | 31-254 |
| | | | | | | | | (71, 116, |
| | | | | | | | | 207) |
| | S01.252 | Brain serine | NM_022119 | 228 | NP_071402 | 229 | 1-32 | 50-292 |
| | | proteinase 2 | | | | | | (90, 141, |
| | | | | | | | | 242) |
| | S01.256 | Chymopasin | NM_001907 | 230 | NP_001898 | 231 | 1-18/19-33 | 34-264 |
| | | | | | | | | (75, 121, |
| | | | | | | | | 214) |
| | S01.257 | kallikrein 11 | NM_006853 | 232 | NP_006844 | 233 | 1-50/51-53 | 22-250 |
| | | | (v1) | | (v1) | | | (62, 110, |
| | | | NM_144947 | 234 | NP_659196 | 235 | | 203) |
| | | | (v2) | | (v2) | | | |
| | S01.258 | anionic trypsin | NM_002770 | 236 | NP_002761 | 237 | 1-15/16-23 | 24-246 |
| | | (Homo sapiens) | | | | | | (63, 107, |
| | | (II) | | | | | | 200) |
| | | (TRY2, TRY8, | | | | | | |
| | | TRYP2) | | | | | | |
| | S01.291 | LOC144757 | Putative, | 238 | AAH48112 | 239 | | 78-319 |
| | | peptidase | BC048112 | | | | | (122, 171, |
| | | (Homo sapiens) | | | | | | 268) |
| | S01.292 | Mername- | BN000133 | 240 | CAD67985 | 241 | 1-19 | 175-406 |
| | | AA169 | | | | | | (215, 260, |
| | | peptidase | | | | | | 356) |
| | S01.294 | Mername- | Putative | | | 242 | | |
| | | AA171 | No DNA | | | | | |
| | | peptidase | | | | | | |
| | S01.298 | Mername- | Putative | | AAC80208 | 243 | | 24-246 |
| | | AA174 | no DNA seq | | | | | (63, 107, |
| | | peptidase | | | | | | 200) |
| | | (TRY6) | | | | | | |
| | S01.299 | Mername- | NM_198464 | 244 | NP_940866 | 245 | | 68-302 |
| | | AA175 | | | | | | (108, 156, |
| | | peptidase | | | | | | 250) |
| | S01.300 | stratum | NM_005046 | 246 | NP_005037 | 247 | 1-22/23-29 | 30-250 |
| | | corneum | (v1) | | | | | (70, 112, |
| | | chymotryptic | NM_139277 | 248 | NP_644806 | 249 | | 205) |
| | | enzyme (SCCE) | (v2) | | | | | |
| | S01.301 | trypsin-like | NM_004262 | 250 | NP_004253 | 251 | | 187-471 |
| | | enzyme, | | | | | | (227, 272, |
| | | respiratory | | | | | | 368) |
| | | (Transmembrane | | | | | | |
| | | protease, | | | | | | |
| | | serine 11D) | | | | | | |
| | S01.302 | Matripase | AF118224 | 252 | AAD42765 | 253 | | 615-855 |
| | | (MTSP1) | | | | | | (656, 711, |
| | | | | | | | | 805) |
| | S01.306 | kallikrein hK13 | NM_015596 | 254 | NP_056411 | 255 | 1-16/ | 36-263 |
| | | | | | | | | (76, 124, |
| | | | | | | | | 218) |
| | S01.307 | kallikrein hK9 | NM_012315 | 256 | NP_036447 | 257 | 1-15/ | 23-250 |
| | | (human | | | | | | (63, 111, |
| | | numbering) | | | | | | 204) |
| | S01.308 | Mername- | NM_153609 | 258 | NP_705837 | 259 | | 49-283 |
| | | AA035 | | | | | | (89, 140, |
| | | peptidase | | | | | | 234) |
| | S01.309 | umbilical vein | NM_007173 | 260 | NP_009104 | 261 | 1-23/ | 95-383 |
| | | proteinase | | | | | | (175, 246, |
| | | | | | | | | 316) |
| | S01.311 | LCLP | Peptide | | P34168 | 262 | | 1-26 |
| | | proteinase | fragment | | | | | (0) |
| | | (LCLP (N- | No DNA | | | | | |
| | | terminus)) | | | | | | |
| | S01.313 | Spinesin | NM_030770 | 263 | NP_110397 | 264 | | 218-455 |
| | | | | | | | | (258, 308, |
| | | | | | | | | 405) |
| | S01.318 | Mername- | NM_183062 | 265 | NP_898885 | 266 | 1-33/ | 53-288 |
| | | AA178 | | | | | | (93, 143, |
| | | peptidase | | | | | | 238) |
| | S01.320 | Mername- | BN000120 | 267 | CAD66452 | 268 | 1-23/ | 52-301 |
| | | AA180 | | | | | | (92, 142, |
| | | peptidase | | | | | | 240) |
| | S01.322 | Mername- | BN000128 | 269 | CAD67579 | 270 | 1-17/ | 8-298 |
| | | AA182 | | | | | | (87, 139, |
| | | peptidase | | | | | | 237) |
| | S01.414 | Mername- | Putative | 271 | BAC11431 | 272 | | 1-177 |
| | | AA122 | AK075142 | | | | | (12, 64, |
| | | peptidase | | | | | | 168) |
| | | (deduced from | | | | | | |
| | | ESTs by | | | | | | |
| | | MEROPS) | | | | | | |
| Cysteine | C01.032 | Cathepsin L | X12451 | 273 | P07711 | 274 | 1-17/18-113 | 113-333 |
| protease: | | | | | | | | (132, 138, |
| Papain | | | | | | | | 276, 300) |
| family | C01.009 | Cathepsin V | U13665 | 275 | O60911 | 276 | 1-17/18-113 | 114-334 |
| | | | | | | | | (132, 138, |
| | | | | | | | | 277, 301) |
| | C01.036 | Cathepsin K | S93414 | 277 | P43235 | 278 | 1-15/16-114 | 115-329 |
| | | | | | | | | (133, 139, |
| | | | | | | | | 276, 296) |
| | C01.034 | Cathepsin S | AJ007331 | 279 | P25774 | 280 | 1-16/17-114 | 115-331 |
| | | | | | | | | (133, 139, |
| | | | | | | | | 278, 298) |
| | C01.018 | Cathepsin F | M14221 | 281 | Q9UBX1 | 282 | 1-19/20-270 | 271-484 |
| | | | | | | | | (289, 295, |
| | | | | | | | | 431, 451) |
| | C01.060 | Cathepsin B | M15203 | 283 | P07858 | 284 | 1-17/18-79 | 80-331 |
| | | | | | | | | (102, 108, |
| | | | | | | | | 278, 298) |
| | C01.001 | Papain | M84342 | 285 | P00784 | 286 | 1-18/19-133 | 135-342 |
| | | | | | | | | (158, |
| | | | | | | | | 292, 308) |
| | C01.075 | Cruzain | Y14734 | 287 | P25779 | 288 | 123-467/ | 124-334 |
| | | (Cruzapain) | | | | | | (147, 284, |
| | | | | | | | | 304, |
| Serine | S08.001 | Subtilisin | X03341 | 290 | P00780 | 289 | 1-29/30-105 | 111-370 |
| Protease: | | Carlsberg | | | | | | (137, |
| subtilisin | | precursor | | | | | | 168, 325) |
| family | S08.002 | Subtilisin | | | P07518 | 291 | | 6-266 |
| | | (Alkaline | | | | | | (32, 64, |
| | | mesentericopeptidase) | | | | | | 221) |
| | S08.003 | Subtilisin | | | P29600 | 292 | | 6-260 |
| | | Savinase | | | | | | (32, 62, |
| | | (Alkaline | | | | | | 215) |
| | | protease) | | | | | | |
| | S08.007 | Thermitase | | | P04072 | 293 | | 13-264 |
| | | | | | | | | (38, 71, |
| | | | | | | | | 225) |
| | S08.009 | Thermophilic | L29506 | 295 | Q45670 | 294 | 1-24/25-121 | 134-391 |
| | | serine | | | | | | (160, 193, |
| | | proteinase | | | | | | 347) |
| | | precursor | | | | | | |
| | | (Ak.1 protease) | | | | | | |
| | S08.020 | C5a peptidase | J05229 | 297 | P15926 | 296 | 1-31/ | 120-339, |
| | | precursor | | | | | | 458-560 |
| | | | | | | | | (130, |
| | | | | | | | | 193, 512) |
| | S08.021 | fervidolysin | AY035311 | 299 | AAK61552 | 298 | | 164-457 |
| | S08.035 | Subtilisin J | M64743 | 301 | P29142 | 300 | 1-29/30-106 | 112-372 |
| | | precursor | | | | | | (138, |
| | | | | | | | | 170, 327) |
| | S08.036 | Subtilisin E | K01988 | 303 | P04189 | 302 | 1-23/24-106 | 112-372 |
| | | precursor | | | | | | (138, 170, |
| | | | | | | | | 327) |
| | S08.037 | Subtilisin DY | | | P00781 | 304 | | 6-257 |
| | | | | | | | | (32, 63, |
| | | | | | | | | 220) |
| | S08.054 | Proteinase K | X14689 | 306 | P06873 | 305 | 1-15/16-105 | 134-373 |
| | | precursor | | | | | | (144, |
| | | (Endopeptidase | | | | | | 174, 329) |
| | | K) | | | | | | |
| | S08.050 | Alkaline serine | M25499 | 308 | P16588 | 307 | 1-21/22-141 | 155-412 |
| | | exoprotease A | | | | | | (180, 213, |
| | | precursor | | | | | | 363) |
| | S08.060 | Epidermin | X62386 | 310 | P30199 | 309 | 1-23/24-? | 123-451 |
| | | leader peptide- | | | | | | (149, |
| | | processing | | | | | | 194, 402) |
| | | serine protease | | | | | | |
| | | epiP precursor | | | | | | |
| | S08.063 | Membrane- | AF078105 | 312 | Q9Z2A8 | 311 | 1-14/18-186 | 179-473 |
| | | bound | | | | | | (218, 249, |
| | | transcription | | | | | | 338, 414) |
| | | factor site 1 | | | | | | |
| | | protease | | | | | | |
| | | precursor (Site- | | | | | | |
| | | 1 protease, | | | | | | |
| | | Subtilisin/kexin- | | | | | | |
| | | isozyme 1, | | | | | | |
| | | SKI-1) | | | | | | |
| | S08.066 | Alkaline | M87516 | 314 | Q03420 | 313 | 1-20/21-120 | 121-409 |
| | | proteinase | | | | | | (161, 192, |
| | | precursor (ALP) | | | | | | 353) |
| | S08.094 | Extracellular | M13469 | 316 | P09489 | 315 | 1-27/ | 50-389 |
| | | serine protease | | | | | | (76, 112, |
| | | precursor | | | | | | 341) |
| | S08.090 | Tripeptidyl- | AF035251 | 318 | Q9V6K1 | 317 | | 5-509 |
| | | peptidase II | | | | | | (131, 359, |
| | | (TPP-II) | | | | | | 549) |
| | S08.114 | Minor | M76590 | 320 | P29141 | 319 | 1-28/29-160 | 163-365, |
| | | extracellular | | | | | | 487-586 |
| | | protease vpr | | | | | | (189, 233, |
| | | precursor | | | | | | 534) |
| | S08.116 | PIII-type | J04962 | 322 | P15292 | 321 | 1-33/34-187 | 190-379, |
| | | proteinase | | | | | | 584-628 |
| | | precursor | | | | | | (217, 281, |
| | | (Lactocepin) | | | | | | 620) |
| | S08.048 | Furin-like | M81431 | 324 | P30430 | 323 | 1-?/?-309 | 376-646 |
| | | protease 1, | | | | | | (372, 413, |
| | | isoform 1-CRR | | | | | | 587) |
| | | precursor | | | | | | |
| | S08.070 | Kexin precursor | M22870 | 326 | P13134 | 325 | 1-19/20-109 | 149-445 |
| | | (KEX2 | | | | | and | (175, |
| | | protease) | | | | | 110-113 | 213, 385) |
| | | (Kex2-like | | | | | | |
| | | endoprotease 1, | | | | | | |
| | | dKLIP-1) | | | | | | |
| | S08.071 | Furin precursor | X17094 | 328 | P09958 | 327 | 1-24/25-107 | 131-421 |
| | | (PACE) | | | | | | (153, 194, |
| | | | | | | | | 295, 368) |
| | S08.075 | Subtilisin/kexin- | M80482 | 330 | P29122 | 329 | 1-63/64-149 | 182-473 |
| | | like protease | | | | | | (205, 246, |
| | | PACE4 | | | | | | 347, 420) |
| | | (Proprotein | | | | | | |
| | | convertase | | | | | | |
| | | subtilisin/kexin | | | | | | |
| | | type 6 | | | | | | |
| | | precursor) | | | | | | |
| | S08.079 | Calcium- | X56955 | 332 | P23916 | 331 | | 254-521 |
| | | dependent | | | | | | (233, 270, |
| | | protease | | | | | | 466) |
| | | precursor | | | | | | |
| | | (Trypsin) | | | | | | |
| Cysteine | C14.001 | Caspase-1 | U14647 | 334 | P43527 | 333 | /1-118 | 120-404 |
| protease: | | precursor | | | | | | 236, 284) |
| caspase | | (Interleukin-1 | | | | | | |
| family | | beta convertase, | | | | | | |
| | | IL-1BC) | | | | | | |
| | C14.002 | Cell death | L29052 | 336 | P42573 | 335 | | 235-495 |
| | | protein 3 | | | | | | (315, 358) |
| | | precursor | | | | | | |
| | C14.003 | Caspase-3 | U13737 | 338 | P42574 | 337 | /1-9 | 10-277 |
| | | precursor | | | | | | (121, 163) |
| | | (Apopain, | | | | | | |
| | | Cysteine | | | | | | |
| | | protease) | | | | | | |
| | C14.004 | Caspase-7 | U39613 | 340 | P55210 | 339 | /1-23 | 29-303 |
| | | precursor | | | | | | (144, 186) |
| | | (ICE-like | | | | | | |
| | | apoptotic | | | | | | |
| | | protease 3, | | | | | | |
| | | Apoptotic | | | | | | |
| | | protease Mch-3) | | | | | | |
| | C14.005 | Caspase-6 | U20536 | 342 | P55212 | 341 | /1-23 | 24-292 |
| | | precursor | | | | | | (121, 163) |
| | | (Apoptotic | | | | | | |
| | | protease Mch-2) | | | | | | |
| | C14.006 | Caspase-2 | D28492 | 344 | P29594 | 343 | /1-169 | 170-432 |
| | | precursor | | | | | | (277, 320) |
| | | (ICH-1 | | | | | | |
| | | protease, | | | | | | |
| | | NEDD2 | | | | | | |
| | | protein) | | | | | | |
| | C14.007 | Caspase-4 | Z48810 | 346 | P49662 | 345 | /1-80 | 93-377 |
| | | precursor | | | | | | (210, 258) |
| | | (ICH-2 | | | | | | |
| | | protease, TX | | | | | | |
| | | protease) | | | | | | |
| | C14.008 | Caspase-5 | U28015 | 348 | P51878 | 347 | /1-120 | 134-418 |
| | | precursor | | | | | | (251, 299) |
| | | (ICH-3 | | | | | | |
| | | protease, TY | | | | | | |
| | | protease, | | | | | | |
| | | ICE(rel)-III) | | | | | | |
| | C14.009 | Caspase-8 | X98172 | 350 | Q14790 | 349 | /1-216 | 193-479 |
| | | precursor | | | | | | (317, 360) |
| | | (FADD-like | | | | | | |
| | | ICE, ICE-like | | | | | | |
| | | apoptotic | | | | | | |
| | | protease 5) | | | | | | |
| | C14.010 | Caspase-9 | U56390 | 352 | P55211 | 351 | | 117-416 |
| | | precursor | | | | | | (237, 287) |
| | | (ICE-LAP6, | | | | | | |
| | | Apoptotic | | | | | | |
| | | protease Mch-6 | | | | | | |
| | C14.011 | Caspase-10 | U60519 | 354 | Q92851 | 353 | /1-219 | 243-514 |
| | | precursor | | | | | | (358, 401) |
| | C14.012 | Caspase-11 | U59463 | 356 | P70343 | 355 | /1-80 | 89-373 |
| | | (Caspase-4 | | | | | | (206, 254) |
| | | precursor) | | | | | | |
| | C14.013 | Caspase-12 | Y13090 | 358 | O08736 | 357 | | 133-419 |
| | | precursor | | | | | | (250, 298) |
| | C14.015 | Caspase | Y12261 | 360 | O01382 | 359 | /1-28 | (169, 211) |
| | | precursor | | | | | | |
| | | (insect) | | | | | | |
| | | (drICE) | | | | | | |
| | C14.016 | Caspase-1 | AF001464 | 362 | O02002 | 361 | /1-33 | (154, 196) |
| | | precursor | | | | | | |
| | | (insect) | | | | | | |
| | C14.017 | Caspase-13 | AF078533 | 364 | O75601 | 363 | | (210, 258) |
| | | precursor | | | | | | |
| | C14.018 | Caspase-14 | AF097874 | 366 | P31944 | 365 | | 1-242 |
| | | precursor | | | | | | (89, 132) |
| | C14.019 | Caspase Nc | AF104357 | 368 | Q9XYF4 | 367 | /1-134 | (271, 318) |
| | | precursor | | | | | | |
| | | (NEDD2-like | | | | | | |
| | | caspase | | | | | | |
| | | DRONC) | | | | | | |
| | C14.026 | MALT | AF130356 | 370 | Q9UDY8 | 369 | | 337-523 |
| | | lymphoma | | | | | | (415, 464) |
| | | translocation | | | | | | |
| | | protein 1 | | | | | | |
| | | paracaspase | | | | | | |
| | | (paracaspase) | | | | | | |
| | C14.971 | CASP8 and | U85059 | 372 | O15519 | 371 | | 260-433 |
| | | FADD-like | | | | | | (315, 363) |
| | | apoptosis | | | | | | |
| | | regulator | | | | | | |
| | | precursor (c- | | | | | | |
| | | FLIP) | | | | | | |

[0331] a. Classes of Proteases

[0332] Proteases (also referred to as proteinases or peptidases) are protein-degrading enzymes that recognize sequences of amino acids or a polypeptide substrate within a target protein. Upon recognition of the substrate sequence of amino acids, proteases catalyze the hydrolysis or cleavage of a peptide bond within a target protein. Such hydrolysis of a target protein, depending on the location of the peptide bond within the context of the full-length sequence of the target sequence, can inactivate, or in some instances activate, a target.

[0333] Proteases are classified based on the way they attack the protein, either exo- or endo-proteases. Proteinases or endopeptidases attack inside the protein to produce large peptides. Peptidases or exopeptidases attack ends or fragments of protein to produce small peptides and amino acids. The peptidases are classified on their action pattern: aminopeptidase cleaves amino acids from the amino end: carboxypeptidase cleaves amino acids from the carboxyl end, dipeptidyl peptidase cleaves two amino acids; dipeptidase splits a dipeptide, and tripeptidase cleaves an amino acid from a tripeptide. Most proteases are small from 21,000 to 45,000 Daltons. Many proteases are synthesized and secreted as inactive forms called zymogens and subsequently activated by proteolysis. This changes the architecture of the active site of the enzyme.

[0334] Several distinct types of catalytic mechanisms are used by proteases (Barret et al. (1994) Meth. Enzymol. 244:18-61; Barret et al. (1994) Meth. Enzymol 244:461-486; Barret et al. (1994) Meth. Enzymol. 248:105-120; Barret et al. (1994) Meth. Enzymol. 248:183-228). Based on their catalytic mechanism, the carboxypeptidases are subdivided into serine-, metallo and cysteine-type carboxypeptidases and the endopeptidases are the serine-, cysteine-, aspartic-, threonine- and metalloendopeptidases. Serine peptidases have a serine residue involved in the active center, the aspartic have two aspartic acids in the catalytic center, cysteine-type peptidases have a cysteine residue, threonine-type peptidases have a threonine residue, and metallo-peptidases use a metal ion in the catalytic mechanism. Generally, proteases can be divided into classes based on their catalytic activity such that classes of proteases can include serine, cysteine, aspartic, threonine, or metallo-proteases. The catalytic activity of the proteases is required to cleave a target substrate. Hence, modification of a protease to alter the catalytic activity of a protease can affect (i.e. modify specificity/selectivity) the ability of a protease to cleave a particular substrate.

[0335] Each protease has a series of amino acids that lines the active site pocket and makes direct contact with the substrate. Crystallographic structures of peptidases show that the active site is commonly located in a groove on the surface of the molecule between adjacent structural domains, and the substrate specificity is dictated by the properties of binding sites arranged along the groove on one or both sides of the catalytic site that is responsible for hydrolysis of the scissile bond. Accordingly, the specificity of a peptidase is described by the ability of each subsite to accommodate a sidechain of a single amino acid residue. The sites are numbered from the catalytic site, S1, S2 . . . Sn towards the N-terminus of the substrate, and S1′, S2′ . . . Sn′ towards the C-terminus. The residues they accommodate are numbered P1, P2 . . . Pn, and P1′, P2′ . . . Pn′, respectively. The cleavage of a target protein is catalyzed between P1 and P1′ where the amino acid residues from the N to C terminus of the polypeptide substrate are labeled (Pi, . . . , P3, P2, P1, P1′, P2′, P3′, . . . , Pj) and their corresponding binding recognition pockets on the protease are labeled (Si, . . . , S3, S2, S1, S1′, S2′, S3′, . . . , Sj) (Schecter and Berger (1967) Biochem Biophys Res Commun 27:157-162). Thus, P2 interacts with S2, P1 with S1, P1′ with S1′, etc. Consequently, the substrate specificity of a protease comes from the S1-S4 positions in the active site, where the protease is in contact with the P1-P4-residues of the peptide substrate sequences. In some cases, there is little (if any) interactions between the S1-S4 pockets of the active site, such that each pocket appears to recognize and bind the corresponding residue on the peptide substrate sequence independent of the other pockets. Thus, the specificity determinants can be changed in one pocket without affecting the specificity of the other pocket. Based upon numerous structures and modeling of family members, surface residues that contribute to extended substrate specificity and other secondary interactions with a substrate have been defined for many proteases including proteases of the serine, cysteine, aspartic, metallo-, and threonine families (see e.g. Wang et al., (2001) Biochemistry 40(34): 10038-46; Hopfner et al., (1999) Structure Fold Des. 7(8):989-96; Friedrich et al. (2002) J Biol. Chem. 277(3):2160-8; Waugh et al., (2000) Nat Struct Biol. 7(9):762-5; Cameron et al., (1993) J Biol. Chem. 268:11711; Cameron et al., (1994) J Biol. Chem. 269: 11170).

[0336] i. Serine Proteases

[0337] Serine proteases (SPs), which include secreted enzymes and enzymes sequestered in cytoplasmic storage organelles, have a variety of physiological roles, including in blood coagulation, wound healing, digestion, immune responses and tumor invasion and metastasis. For example, chymotrypsin, trypsin, and elastase function in the digestive tract; Factor 10, Factor 11, Thrombin, and Plasmin are involved in clotting and wound healing; and C1r, C1s, and the C3 convertases play a role in complement activation.

[0338] A class of cell surface proteins designated type II transmembrane serine proteases are proteases which are membrane-anchored proteins with extracellular domains. As cell surface proteins, they play a role in intracellular signal transduction and in mediating cell surface proteolytic events. Other serine proteases are membrane bound and function in a similar manner. Others are secreted. Many serine proteases exert their activity upon binding to cell surface receptors, and, hence act at cell surfaces. Cell surface proteolysis is a mechanism for the generation of biologically active proteins that mediate a variety of cellular functions.

[0339] Serine proteases, including secreted and transmembrane serine proteases, are involved in processes that include neoplastic development and progression. While the precise role of these proteases has not been fully elaborated, serine proteases and inhibitors thereof are involved in the control of many intra- and extracellular physiological processes, including degradative actions in cancer cell invasion and metastatic spread, and neovascularization of tumors that are involved in tumor progression. Proteases are involved in the degradation and remodeling of extracellular matrix (ECM) and contribute to tissue remodeling, and are necessary for cancer invasion and metastasis. The activity and/or expression of some proteases have been shown to correlate with tumor progression and development.

[0340] Over 20 families (denoted S1-S27) of serine protease have been identified, these being grouped into 6 clans (SA, SB, SC, SE, SF and SG) on the basis of structural similarity and other functional evidence (Rawlings N D et al. (1994) Meth. Enzymol. 244: 19-61). There are similarities in the reaction mechanisms of several serine peptidases. Chymotrypsin, subtilisin and carboxypeptidase C clans have a catalytic triad of serine, aspartate and histidine in common: serine acts as a nucleophile, aspartate as an electrophile, and histidine as a base. The geometric orientations of the catalytic residues are similar between families, despite different protein folds. The linear arrangements of the catalytic residues commonly reflect clan relationships. For example the catalytic triad in the chymotrypsin clan (SA) is ordered HDS, but is ordered DHS in the subtilisin clan (SB) and SDH in the carboxypeptidase clan (SC).

[0341] Examples of serine proteases of the chymotrypsin superfamily include tissue-type plasminogen activator (tPA), trypsin, trypsin-like protease, chymotrypsin, plasmin, elastase, urokinase (or urinary-type plasminogen activator, u-PA), acrosin, activated protein C, C1 esterase, cathepsin G, chymase, and proteases of the blood coagulation cascade including kallikrein, thrombin, and Factors VIIa, IXa, Xa, XIa, and XIIa (Barret, A. J., In: Proteinase Inhibitors, Ed. Barrett, A. J., Et al., Elsevier, Amsterdam, Pages 3-22 (1986); Strassburger, W. et al., (1983) FEBS Lett., 157:219-223; Dayhoff, M. O., Atlas of Protein Sequence and Structure, Vol 5, National Biomedical Research Foundation, Silver Spring, Md. (1972); and Rosenberg, R. D. et al. (1986) Hosp. Prac., 21: 131-137).

[0342] The activity of proteases in the serine protease family is dependent on a set of amino acid residues that form their active site. One of the residues is always a serine; hence their designation as serine proteases. For example, chymotrypsin, trypsin, and elastase share a similar structure and their active serine residue is at the same position (Ser-195) in all three. Despite their similarities, they have different substrate specificities; they cleave different peptide bonds during protein digestion. For example, chymotrypsin prefers an aromatic side chain on the residue whose carbonyl carbon is part of the peptide bond to be cleaved. Trypsin prefers a positively charged Lys or Arg residue at this position. Serine proteases differ markedly in their substrate recognition properties: some are highly specific (i.e. the proteases involved in blood coagulation and the immune complement system); some are only partially specific (i.e. the mammalian digestive proteases trypsin and chymotrypsin); and others, like subtilisin, a bacterial protease, are completely non-specific. Despite these differences in specificity, the catalytic mechanism of serine proteases is well conserved.

[0343] The mechanism of cleavage of a target protein by a serine protease is based on nucleophilic attack of the targeted peptidic bond by a serine. Cysteine, threonine or water molecules associated with aspartate or metals also can play this role. In many cases the nucleophilic property of the group is improved by the presence of a histidine, held in a “proton acceptor state” by an aspartate. Aligned side chains of serine, histidine and aspartate build the catalytic triad common to most serine proteases. For example, the active site residues of chymotrypsin, and serine proteases that are members of the same family as chymotrypsin, such as for example MTSP-1, are Asp102, His57, and Ser195.

[0344] The catalytic domains of all serine proteases of the chymotrypsin superfamily have both sequence homology and structural homology. The sequence homology includes the conservation of: 1) the characteristic active site residues (e.g., Ser195, His57, and Asp102 in the case of trypsin); 2) the oxyanion hole (e.g., Gly193, Asp194 in the case of trypsin); and 3) the cysteine residues that form disulfide bridges in the structure (Hartley, B. S., (1974) Symp. Soc. Gen. Microbiol., 24: 152-182). The structural homology includes 1) a common fold characterized by two Greek key structures (Richardson, J. (1981) Adv. Prot. Chem., 34:167-339); 2) a common disposition of catalytic residues; and 3) detailed preservation of the structure within the core of the molecule (Stroud, R. M. (1974) Sci. Am., 231: 24-88).

[0345] Throughout the chymotrypsin family of serine proteases, the backbone interaction between the substrate and enzyme is completely conserved, but the side chain interactions vary considerably. The identity of the amino acids that contain the S1-S4 pockets of the active site determines the substrate specificity of that particular pocket. Grafting the amino acids of one serine protease to another of the same fold modifies the specificity of one to the other. Typically, the amino acids of the protease that contain the S1-S4 pockets are those that have side chains within 4 to 5 angstroms of the substrate. The interactions these amino acids have with the protease substrate are generally called “first shell” interactions because they directly contact the substrate. There, however, can be “second shell” and “third shell” interactions that ultimately position the first shell amino acids. First shell and second shell substrate binding effects are determined primarily by loops between beta-barrel domains. Because these loops are not core elements of the protein, the integrity of the fold is maintained while loop variants with novel substrate specificities can be selected during the course of evolution to fulfill necessary metabolic or regulatory niches at the molecular level. Typically for serine proteases, the following amino acids in the primary sequence are determinants of specificity: 195, 102, 57 (the catalytic triad); 189, 190, 191, 192, and 226 (S1); 57, the loop between 58 and 64, and 99 (S2); 192, 217, 218 (S3); the loop between Cys168 and Cys180, 215, and 97 to 100 (S4); and 41 and 151 (S2′), based on chymotrypsin numbering, where an amino acid in an S1 position affects P1 specificity, an amino acid in an S2 position affects P2 specificity, an amino acid in the S3 position affects P3 specificity, and an amino acid in the S4 position affects P4 specificity. Position 189 in a serine protease is a residue buried at the bottom of the pocket that determines the S1 specificity. Structural determinants for various serine proteases are listed in Table 8 with numbering based on the numbering of mature chymotrypsin, with protease domains for each of the designated proteases aligned with that of the protease domain of chymotrypsin. The number underneath the Cys168-Cys182 and 60's loop column headings indicate the number of amino acids in the loop between the two amino acids and in the loop. The yes/no designation under the Cys191-Cys220 column headings indicates whether the disulfide bridge is present in the protease. These regions are variable within the family of chymotrypsin-like serine proteases and represent structural determinants in themselves. Modification of a protease to alter any one or more of the amino acids in the S1-S4 pocket affect the specificity or selectivity of a protease for a target substrate.

TABLE 8
The structural determinants for various serine proteases
Residues that Determine Specificity

| | S4 | | | | | | | S2 | | | S1 | | | |
|---|---|---|---|---|---|---|---|---|---|---|---|---|---|---|
| | | | | | Cys168 | S3 | | | | 60's | | | | Cys191 |
| | 171 | 174 | 180 | 215 | Cys182 | 192 | 218 | 99 | 57 | loop | 189 | 190 | 226 | Cys220 |
| Granzyme B | Leu | Tyr | Glu | Tyr | 14 | Arg | Asn | Ile | His | 6 | Gly | Ser | Arg | No |
| Granzyme A | Asn | Val | Met | Phe | 17 | Asn | Leu | Arg | His | 7 | Asp | Ser | Gly | Yes |
| Granzyme M | Arg | Ser | Met | Phe | 15 | Lys | Arg | Leu | His | 8 | Ala | Pro | Pro | Yes |
| Cathepsin G | Phe | Ser | Gln | Tyr | 13 | Lys | Ser | Ile | His | 6 | Ala | Ala | Glu | No |
| MT-SP1 | Leu | Gln | Met | Trp | 13 | Gln | Asp | Phe | His | 16 | Asp | Ser | Gly | Yes |
| Neutrophil | — | — | — | Tyr | 5 | Phe | Gly | Leu | His | 10 | Gly | Val | Asp | Yes |
| elastase | | | | | | | | | | | | | | |
| Chymase | Phe | Arg | Gln | Tyr | 12 | Lys | Ser | Phe | His | 6 | Ser | Ala | Ala | No |
| Alpha- | Tyr | Ile | Met | Trp | 22 | Lys | Glu | Ile | His | 9 | Asp | Ser | Gly | Yes |
| tryptase | | | | | | | | | | | | | | |
| Beta- | Tyr | Ile | Met | Trp | 22 | Gln | Glu | Val | His | 9 | Asp | Ser | Gly | Yes |
| tryptase(I) | | | | | | | | | | | | | | |
| Beta- | Tyr | Ile | Met | Trp | 22 | Lys | Glu | Thr | His | 9 | Asp | Ser | Gly | Yes |
| tryptase | | | | | | | | | | | | | | |
| (II) | | | | | | | | | | | | | | |
| Chymo- | Trp | Arg | Met | Trp | 13 | Met | Ser | Val | His | 7 | Ser | Ser | Gly | Yes |
| trypsin | | | | | | | | | | | | | | |
| Easter | Tyr | Ser | Gln | Phe | 16 | Arg | Thr | Gln | His | 14 | Asp | Ser | Gly | Yes |
| Collagenase | Tyr | Ile | — | Phe | 12 | Asn | Ala | Ile | His | 8 | Gly | Thr | Asp | Yes |
| Factor Xa | Ser | Phe | Met | Trp | 13 | Gln | Glu | Tyr | His | 8 | Asp | Ala | Gly | Yes |
| Protein C | Met | asn | Met | Trp | 13 | Glu | Glu | Thr | His | 8 | Asp | Ala | Gly | Yes |
| Plasma | Tyr | Gln | Met | Tyr | 13 | Arg | Pro | Phe | His | 11 | Asp | Ala | Ala | Yes |
| kallikrein | | | | | | | | | | | | | | |
| Plasmin | Glu | Arg | Glu | Trp | 15 | Gln | Leu | Thr | His | 11 | Asp | Ser | Gly | Yes |
| Trypsin | Tyr | Lys | Met | Trp | 13 | Gln | Tyr | Leu | His | 6 | Asp | Ser | Gly | Yes |
| Thrombin | Thr | Ile | Met | Trp | 13 | Glu | Glu | Leu | His | 16 | Asp | Ala | Gly | Yes |
| tPA | Leu | Thr | Met | Trp | 15 | Gln | Leu | Tyr | His | 11 | Asp | Ala | Gly | Yes |
| uPA | His | Ser | Met | Trp | 15 | Gln | Arg | His | His | 11 | Asp | Ser | Gly | yes |

[0346] (a) Urokinase-Type Plasminogen Activator (u-PA)

[0347] Urokinase-type plasminogen activator (u-PA, also called urinary plasminogen activator) is an exemplary protease used as a candidate for selection in the methods herein. u-PA is set forth in SEQ ID NO: 190 and encodes a precursor amino acid sequence set forth in SEQ ID NO:191. u-PA is found in urine, blood, seminal fluids, and in many cancer tissues. It is involved in a variety of biological process, which are linked to its conversion of plasminogen to plasmin, which itself is a serine protease. Plasmin has roles in a variety of normal and pathological processes including, for example, cell migration and tissue destruction through its cleavage of a variety of molecules including fibrin, fibronectin, proteoglycans, and laminin. u-PA is involved in tissue remodeling during wound healing, inflammatory cell migration, neovascularization and tumor cell invasion. u-PA also cleaves and activates other substrates, including, but not limited to, hepatocyte growth factor/scatter factor (HGF/SF), the latent form of membrane type 1 matrix metalloprotease (MT-SP1), and others.

[0348] The mature form of u-PA is a 411 residue protein (corresponding to amino acid residues 21 to 431 in the sequence of amino acids set forth in SEQ ID NO: 191, which is the precursor form containing a 20 amino acid signal peptide). u-PA contains three domains: the serine protease domain, the kringle domain and the growth factor domain. In the mature form of human u-PA, amino acids 1-158 represent the N-terminal A chain including a growth factor domain (amino acids 1-49), a kringle domain (amino acids 50-131), and an interdomain linker region (amino acids 132-158). Amino acids 159-411 represent the C-terminal serine protease domain or B chain. u-PA is synthesized and secreted as a single-chain zymogen molecule, which is converted into an active two-chain u-PA by a variety of proteases including, for example, plasmin, kallikrein, cathepsin B, and nerve growth factor-gamma. Cleavage into the two chain form occurs between residues 158 and 159 in a mature u-PA sequence (corresponding to amino acid residues 178 and 179 in SEQ ID NO:191). The two resulting chains are kept together by a disulfide bond, thereby forming the two-chain form of u-PA.

[0349] u-PA is regulated by the binding to a high affinity cell surface receptor, uPAR. Binding of u-PA to uPAR increases the rate of plasminogen activation and enhances extracellular matrix degradation and cell invasion. The binary complex formed between uPAR and u-PA interact with membrane-associated plasminogen to form higher order activation complexes that reduce the Km (i.e. kinetic rate constant of the approximate affinity for a substrate) for plasminogen activation (Bass et al. (2002) Biochem. Soc. Trans., 30: 189-194). In addition, binding of u-PA to uPAR protects the protease from inhibition by the cognate inhibitor, i.e. PAI-1. This is because single chain u-PA normally present in plasma is not susceptible to inhibition by PAI-1, and any active u-PA in the plasma will be inhibited by PAI-1. Active u-PA that is receptor bound is fully available for inhibition by PAI-1, however, PAI-1 is unable to access the bound active molecule (Bass et al. (2002) Biochem. Soc. Trans., 30: 189-194). As a result, u-PA primarily functions on the cell surface and its functions are correlated with the activation of plasmin-dependent pericellular proteolysis.

[0350] The extended substrate specificity of u-PA and t-PA (discussed below) are similar, owing to the fact that both are responsible for cleaving plasminogen into active plasmin. Both u-PA and t-PA have high specificity for cleavage after P1 Arg, and they similarly show a preference for small amino acids at the P2 position. Both of the P3 and P4 positions are specificity determinants for substrates of u-PA and tPA, with a particularly prominent role of the P3 position (Ke et al. (1997) J. Biol. Chem., 272: 16603-16609). The preference for amino acids at the P3 position are distinct, and is the main determinant for altered substrate discrimination between the two proteases. t-PA has a preference for aromatic amino acids (Phe and Tyr) at the P3 position, while u-PA has a preference for small polar amino acids (Thr and Ser) (see e.g., Ke et al. (1997) J. Biol. Chem., 272: 16603-16609; Harris et al. (2000) PNAS, 97: 7754-7759).

[0351] (b) Tissue Plasminogen Activator (t-PA)

[0352] A candidate protease for selection against a protease trap in the methods herein also includes the exemplary serine protease tissue plasminogen activator (tPA), and variants thereof. t-PA is a serine protease that converts plasminogen to plasmin, which is involved in fibrinolysis or the formation of blood clots. Recombinant t-PA is used as a therapeutic in diseases characterized by blood clots, such as for example, stroke. Alternative splicing of the t-PA gene produces three transcripts. The predominant transcript is set forth in SEQ ID NO:192 and encodes a precursor protein set forth in SEQ ID NO:193 containing a 20-23 amino acid signal sequence and a 12-15 amino acid pro-sequence. The other transcripts are set forth in SEQ ID NO: 194 and 196, encoding precursor proteins having a sequence of amino acids set forth in SEQ ID NOS: 195 and 197, respectively. The mature sequence of tPA, lacking the signal sequence and propeptide sequence is 527 amino acids.

[0353] t-PA is secreted by the endothelium of blood vessels and circulates in the blood as a single-chain form. Unlike many other serine proteases, the single-chain or “proenzyme” form of t-PA has high catalytic efficiency. The activity of t-PA is increased in the presence of fibrin. In the absence of fibrin, single-chain t-PA is about 8% as active as compared to two-chain t-PA, however in the presence of fibrin the single- and two-chain forms oft-PA display similar activity. (Strandberg et al. (1995) J. Biol. Chem., 270: 23444-23449). Thus, activation of single-chain t-PA can be accomplished either by activation cleavage (i.e. zymogen cleavage), resulting in a two-chain form, or by binding to the co-factor fibrin. Activation cleavage occurs following cleavage by plasmin, tissue kallikrein, and activated Factor X at amino acid positions Arg²⁷⁵-Ile²⁷⁶ (corresponding to Arg³¹⁰-Ile³¹¹ in the sequence of amino acids set forth in SEQ ID NO:193) resulting in the generation of the active two-chain form of t-PA. The two-chain polypeptide contains an A and a B chain that are connected by an interchain disulfide bond.

[0354] The mature t-PA contains 16 disulfide bridges and is organized into five distinct domains (Gething et al. (1988), The EMBO J., 7: 2731-2740). Residues 4-50 of the mature protein form a finger domain, residues 51-87 form an EGF-like domain, residues 88-175 and 176-263 form two kringle domains that contain three intradomain disulfide bonds each, and residues 277-527 of the mature molecule (corresponding to amino acid residues 311-562 of the precursor sequence set forth in SEQ ID NO: 193) make up the serine protease domain.

[0355] In contrast to u-PA, which acts as a cellular receptor-bound activator, t-PA functions as a fibrin-dependent circulatory activation enzyme. Likewise, both single- and two-chain forms of t-PA are susceptible to inhibition by their cognate inhibitors, for example, PAI-1, although two-chain t-PA is inhibited by PAI-1 approximately 1.4 times more rapidly than single-chain t-PA (Tachias et al. (1997) J. Biol. Chem., 272: 14580-5). t-PA can become protected from inhibition by binding to its cellular binding site Annexin-II on endothelial cells. Thus, although both t-PA and u-PA both cleave and activate plasminogen, the action of t-PA in the blood supports t-PA as the primary fibrinolytic activator of plasminogen, while u-PA is the primary cellular activator of plasminogen.

[0356] (c) MT-SP1

[0357] Membrane-type serine protease MT-SP1 (also called matriptase, TADG-15, suppressor of tumorigenicity 14, ST14) is an exemplary protease for selection in the methods provided herein to select for variants with an altered substrate specificity against a desired or predetermined substrate cleavage sequence. The sequence of MT-SP1 is set forth in SEQ ID NO:252 and encodes an 855 amino acid polypeptide having a sequence of amino acids set forth in SEQ ID NO:253. It is a multidomain proteinase with a C-terminal serine proteinase domain (Friedrich et al. (2002) J Biol Chem 277(3):2160). A 683 amino acid variant of the protease has been isolated, but this protein appears to be a truncated form or an ectodomain form.

[0358] MT-SP1 is highly expressed or active in prostate, breast, and colorectal cancers and it can play a role in the metastasis of breast and prostate cancer. MT-SP 1 also is expressed in a variety of epithelial tissues with high levels of activity and/or expression in the human gastrointestinal tract and the prostate. Other species of MT-SP1 are known. For example, a mouse homolog of MT-SP1 has been identified and is called epithin.

[0359] MT-SP 1 contains a transmembrane domain, two CUB domains, four LDLR repeats, and a serine protease domain (or peptidase S1 domain; also called the B-chain) between amino acids 615-854 (or 615-855 depending on variations in the literature) in the sequence set forth in SEQ ID NO:253. The amino acid sequence of the protease domain is set forth in SEQ ID NO:505 and encoded by a sequence of nucleic acids set forth in SEQ ID NO:504. MT-SP1 is synthesized as a zymogen, and activated to double chain form by cleavage. In addition, the single chain proteolytic domain alone is catalytically active and functional.

[0360] An MT-S P1 variant, termed CB469, having a mutation of C122S corresponding to the wild-type sequence of MT-SP1 set forth in either SEQ ID NO: 253 or 505, based on chymotrypisn numbering, exhibits improved display on phagemid vectors. Such a variant MT-SP 1 is set forth in SEQ ID NO:515 (full length MT-SP1) or SEQ ID NO:507 (protease domain) and can be used in the methods described herein below.

[0361] MT-SP 1 belongs to the peptidase S1 family of serine proteases (also referred to as the chymotrypsin family), which also includes chymotrypsin and trypsin. Generally, chymotrypsin family members share sequence and structural homology with chymotrypsin. MT-SP1 is numbered herein according to the numbering of mature chymotrypsin, with its protease domain aligned with that of the protease domain of chymotrypsin and its residues numbered accordingly. Based on chymotrypsin numbering, active site residues are Asp102, His57, and Ser195 (corresponding to Asp711, His656, and Ser805 in SEQ ID NO:253). The linear amino acid sequence can be aligned with that of chymotrypsin and numbered according to the β sheets of chymotrypsin. Insertions and deletions occur in the loops between the beta sheets, but throughout the structural family, the core sheets are conserved. The serine protease interacts with a substrate in a conserved beta sheet manner. Up to 6 conserved hydrogen bonds can occur between the substrate and enzyme. All serine proteases of the chymotrypsin family have a conserved region at their N-terminus of the protease domain that is necessary for catalytic activity (i.e. IIGG, VVGG, or IVGG, where the first amino acid in this quartet is numbered according to the chymotrypsin numbering and given the designation Ile16. This numbering does not reflect the length of the precursor sequence).

[0362] The substrate specificity of MT-SP 1 in the protease domain has been mapped using a positional scanning synthetic combinatorial library and substrate phage display (Takeuchi et al. (2000) J Biol Chem 275: 26333). Cleavage residues in substrates recognized by MT-SP 1 contain Arg/Lys at P4 and basic residues or Gln at P3, small residues at P2, Arg or Lys at P1, and Ala at P1′. Effective substrates contain Lys-Arg-Ser-Arg in the P4 to P1 sites, respectively. Generally, the substrate specificity for MT-SP 1 reveals a trend whereby if P3 is basic, then P4 tends to be non-basic; and if P4 is basic, then P3 tends to be non-basic. Known substrates for MT-S P1, including, for example, proteinase-activated receptor-2 (PAR-2), single-chain uPA (sc-uPA), the proform of MT-SP 1, and hepatocyte growth factor (HGF), conform to the cleavage sequence for MT-SP1 specific substrates.

[0363] MT-SP 1 can cleave selected synthetic substrates as efficiently as trypsin, but exhibit a more restricted specificity for substrates than trypsin. The catalytic domain of MT-SP1 has the overall structural fold of a (chymo)trypsin-like serine protease, but displays unique properties such as a hydrophobic/acidic S2/S4 sub-sites and an exposed 60 loop. Similarly, MT-SP1 does not indiscriminately cleave peptide substrates at accessible Lys or Arg residues, but requires recognition of additional residues surrounding the scissile peptide bond. This requirement for an extended primary sequence highlights the specificity of MT-SP1 for its substrates. For example, although MT-S P1 cleaves proteinase activated receptor-2 (PAR-2) (displaying a P4 to P1 target sequence of Ser-Lys-Gly-Arg), the enzyme does not activate proteins closely related to this substrate such as PAR-1, PAR-3, and PAR-4 that do not display target sequences matching the extended MT-SP1 specificity near the scissile bond (see Friedrich et al. (2002) J Biol Chem 277: 2160).

[0364] The protease domain of MT-SP 1 is composed of a pro-region and a catalytic domain. The catalytically active portion of the polypeptide begins after the autoactivation site at amino acid residue 611 of the mature protein (see, e.g., SEQ ID NO: 253 at RQAR followed by the residues VVGG). The S1 pocket of MT-SP1 and trypsin are similar with good complementarity for Lys as well as Arg P1 residues, thereby accounting for some similarities in substrate cleavage with trypsin. The accommodation of the PI-Lys residues is mediated by Ser¹⁹⁰ whose side chain provides an additional hydrogen bond acceptor to stabilize the buried α-ammonium group (see Friedrich et al. (2002) J Biol Chem 277: 2160). The S2 pocket is shaped to accommodate small to medium-sized hydrophobic side chains of P2 amino acids and generally accepts a broad range of amino acids at the P2 position. Upon substrate binding, the S2 sub-site is not rigid as evidenced by the rotation of the Phe⁹⁹ benzyl group. The substrate amino acids at positions P3 (for either Gln or basic residues) and P4 (for Arg or Lys residues) appears to be mediated by electrostatic interactions in the S3 and S4 pockets with the acidic side chains of Asp-217 and/or Asp-96 which could favorably pre-orient specific basic peptide substrates as they approach the enzyme active site cleft. The side chain of a P3 residue also is able to hydrogen bond the carboxamide group of Gln¹⁹² or alternatively, the P3 side chain can extend into the S4 sub-site to form a hydrogen bond with Phe⁹⁷ thereby weakening the inter-main chain hydrogen bonds with Gly²¹⁶. In either conformation, a basic P3 side chain is able to interact favorably with the negative potential of the MT-SP 1 S4 pocket. The mutual charge compensation and exclusion from the same S4 site explains the low probability of the simultaneous occurrence of Arg/Lys residues at P3 and P4 in good MT-SP 1 substrates. Generally, the amino acid positions of MT-SP 1 (based on chymotrypsin numbering) that contribute to extended specificity for substrate binding include: 146 and 151 (S1′); 189, 190, 191, 192, 216, 226(S1); 57, 58, 59, 60, 61, 62, 63, 64, 99 (S2); 192, 217, 218, 146 (S3); 96, 97, 98, 99, 100, 168, 169, 170, 170A, 171, 172, 173, 174, 175, 176, 178, 179, 180, 215, 217, 224 (S4).

[0365] ii. Cysteine Proteases

[0366] Cysteine proteases have a catalytic mechanism that involves a cysteine sulfhydryl group. Deprotonation of the cysteine sulfhydryl by an adjacent histidine residue is followed by nucleophilic attack of the cysteine on the peptide carbonyl carbon. A thioester linking the new carboxy-terminus to the cysteine thiol is an intermediate of the reaction (comparable to the acyl-enzyme intermediate of a serine protease). Cysteine proteases include papain, cathepsin, caspases, and calpains.

[0367] Papain-like cysteine proteases are a family of thiol dependent endo-peptidases related by structural similarity to papain. They form a two-domain protein with the domains labeled R and L (for right and left) and loops from both domains form a substrate recognition cleft. They have a catalytic triad made up of the amino acids Cys25, His159, and Asn175. Unlike serine proteases which recognize and proteolyze a target peptide based on a beta-sheet conformation of the substrate, this family of proteases does not have well-defined pockets for substrate recognition. The main substrate recognition occurs at the P2 amino acid (compared to the P1 residue in serine proteases).

[0368] The substrate specificity of a number of cysteine proteases (human cathepsin L, V, K, S, F, B, papain, and cruzain) has been determined using a complete diverse positional scanning synthetic combinatorial library (PS-SCL). The complete library contains P1, P2, P3, and P4 tetrapeptide substrates in which one position is held fixed while the other three positions are randomized with equal molar mixtures of the 20 possible amino acids, giving a total diversity of ˜160,000 tetrapeptide sequences.

[0369] Overall, P1 specificity is almost identical between the cathepsins, with Arg and Lys being strongly favored while small aliphatic amino acids are tolerated. Much of the selectivity is found in the P2 position, where the human cathepsins are strictly selective for hydrophobic amino acids. Interestingly, P2 specificity for hydrophobic residues is divided between aromatic amino acids such as Phe, Tyr, and Trp (cathepsin L, V), and bulky aliphatic amino acids such as Val or Leu (cathepsin K, S, F). Compared to the P2 position, selectivity at the P3 position is significantly less stringent. Several of the proteases, however, have a distinct preference for proline (cathepsin V, S, and papain), leucine (cathepsin B), or arginine (cathepsin S, cruzain). The proteases show broad specificity at the P4 position, as no one amino acid is selected over others.

[0370] The S2 pocket is the most selective and best characterized of the protease substrate recognition sites. It is defined by the amino acids at the following spatial positions (papain numbering): 66, 67, 68, 133, 157, 160, and 205. Position 205 plays a role similar to position 189 in the serine proteases—a residue buried at the bottom of the pocket that determines the specificity. The other specificity determinants include the following amino acids (numbering according to papain): 61 and 66 (S3); 19, 20, and 158 (S1). The structural determinant for various cysteine proteases are listed in Table 9. Typically, modification of a cysteine protease, such as for example a papain protease, to alter any one or more of the amino acids in the extended specificity binding pocket or other secondary sites of interaction affect the specificity or selectivity of a protease for a target substrate including a complement protein target substrate.

TABLE 9
The structural determinants for various cysteine proteases
Residues that Determine Specificity

| | Active Site | | | | | | | | | | | | |
|---|---|---|---|---|---|---|---|---|---|---|---|---|---|
| | Residues | | | S3 | | S2 | | | | | S1 | | |
| | 25 | 159 | 175 | 61 | 66 | 66 | 133 | 157 | 160 | 205 | 19 | 20 | 158 |
| Cathepsin L | Cys | His | Asn | Glu | Gly | Gly | Ala | Met | Gly | Ala | Gln | Gly | Asp |
| Cathepsin V | Cys | His | Asn | Gln | Gly | Gly | Ala | Leu | Gly | Ala | Gln | Lys | Asp |
| Cathepsin K | Cys | His | Asn | Asp | Gly | Gly | Ala | Leu | Ala | Leu | Gln | Gly | Asn |
| Cathepsin S | Cys | His | Asn | Lys | Gly | Gly | Gly | Val | Gly | Phe | Gln | Gly | Asn |
| Cathepsin F | Cys | His | Asn | Lys | Gly | Gly | Ala | Ile | Ala | Met | Gln | Gly | Asp |
| Cathepsin B | Cys | His | Asn | Asp | Gly | Gly | Ala | Gly | Ala | Glu | Gln | Gly | Gly |
| Papain | Cys | His | Asn | Tyr | Gly | Gly | Val | Val | Ala | Ser | Gln | Gly | Asp |
| Cruzain | Cys | His | Asn | Ser | Gly | Gly | Ala | Leu | Gly | Glu | Gln | Gly | Asp |

### E. MODIFIED PROTEASES AND COLLECTIONS FOR SCREENING

[0371] Proteases or variants thereof can be used in the methods herein to identify proteases with a desired substrate specificity, most often a substrate specificity that is altered, improved, or optimized. Modified proteases to be used in the method provided herein can be generated by mutating any one or more amino acid residues of a protease using any method commonly known in the art (see also published U.S. Appln. No. 2004/0146938). Proteases for modification and the methods provided herein include, for example, full-length wild-type proteases, known variant forms of proteases, or fragments of proteases that are sufficient for catalytic activity, e.g. proteolysis of a substrate. Such modified proteases can be screened individually against a target protease trap, such as a serpin or modified serpin, or they can be screened as a collection, such as for example by using a display library, including a combinatorial library where display of the protease is by, for example, phage display, cell-surface display, bead display, ribosome display, or others. Selection of a protease that exhibits specificity and/or selectivity for a protease trap or modified form thereof, due to the formation of a stable covalent inhibitory complex, can be facilitated by any detection scheme known to one of skill in the art including, but not limited to, affinity labeling and/or purification, ELISA, chromogenic assays, fluorescence-based assays (e.g. fluorescence quenching or FRET), among others.

### 1. Generation of Variant Proteases

[0372] Examples of methods to mutate protease sequences include methods that result in random mutagenesis across the entire sequence or methods that result in focused mutagenesis of a select region or domain of the protease sequence. In one example, the number of mutations made to the protease is 1, 2, 3, 4, 5, 6, 7, 8, 9, 10, 11, 12, 13, 14, 15, 16, 17, 18, 19, or 20. In a preferred embodiment, the mutation(s) confer increased substrate specificity. In some examples, the activity of the protease variant is increased by at least 10-fold, 100-fold, or 1000-fold over the activity of the wild-type protease. In related aspects, the increase in activity is in substrate specificity.

[0373] a. Random Mutagenesis

[0374] Random mutagenesis methods include, for example, use of E. coli XL1red, UV irradiation, chemical modification such as by deamination, alkylation, or base analog mutagens, or PCR methods such as DNA shuffling, cassette mutagenesis, site-directed random mutagenesis, or error prone PCR (see e.g. U.S. Application No.: 2006-0115874). Such examples include, but are not limited to, chemical modification by hydroxylamine (Ruan, H., et al. (1997) Gene 188:35-39), the use of dNTP analogs (Zaccolo, M., et al. (1996) J. Mol. Biol. 255:589-603), or the use of commercially available random mutagenesis kits such as, for example, GeneMorph PCR-based random mutagenesis kits (Stratagene) or Diversify random mutagenesis kits (Clontech). The Diversify random mutagenesis kit allows the selection of a desired mutation rate for a given DNA sequence (from 2 to 8 mutations/1000 base pairs) by varying the amounts of manganese (Mn2+) and dGTP in the reaction mixture. Raising manganese levels initially increases the mutation rate, with a further mutation rate increase provided by increased concentration of dGTP. Even higher rates of mutation can be achieved by performing additional rounds of PCR.

[0375] b. Focused Mutagenesis

[0376] Focused mutation can be achieved by making one or more mutations in a pre-determined region of a gene sequence, for example, in regions of the protease domain that mediate catalytic activity. In one example, any one or more amino acids of a protease are mutated using any standard single or multiple site-directed mutagenesis kit such as for example QuikChange (Stratagene). In another example, any one or more amino acids of a protease are mutated by saturation mutagenesis (Zheng et al. (2004) Nucl. Acids. Res., 32:115), such as for example, mutagenesis of active site residues. In this example, residues that form the S1-S4 pocket of a protease (where the protease is in contact with the P1-P4 residues of the peptide substrate) and/or that have been shown to be important determinants of specificity are mutated to every possible amino acid, either alone or in combination. In some cases, there is little (if any) interaction between the S1-S4 pockets of the active site, such that each pocket appears to recognize and bind the corresponding residue on the peptide substrate sequence independent of the other pockets. Thus, the specificity determinants generally can be changed in one pocket without affecting the specificity of the other pockets. In one exemplary embodiment, a saturation mutagenesis technique is used in which the residue(s) lining the pocket are mutated to each of the 20 possible amino acids (see for example the Kunkle method, Current Protocols in Molecular Biology, John Wiley and Sons, Inc., Media Pa.). In such a technique, a degenerate mutagenic oligonucleotide primer can be synthesized which contains randomization of nucleotides at the desired codon(s) encoding the selected amino acid(s). Exemplary randomization schemes include NNS- or NNK-randomization, where N represents any nucleotide, S represents guanine or cytosine and K represents guanine or thymine. The degenerate mutagenic primer is annealed to the single stranded DNA template and DNA polymerase is added to synthesize the complementary strand of the template. After ligation, the double stranded DNA template is transformed into E. coli for amplification.

[0377] Amino acids that form the extended substrate binding pocket of exemplary proteases are described herein. Generally, the substrate specificity of a protease is known such as for example by molecular modeling based on three-dimensional structures of the complex of a protease and substrate (see for example, Wang et al., (2001) Biochemistry 40(34):10038; Hopfner et al., Structure Fold Des. 1999 7(8):989; Friedrich et al., (2002) J Biol Chem 277(3):2160; Waugh et al., (2000) Nat Struct Biol. 7(9):762). For example, focused mutations of MT-SP1 can be in any one or more residues (based on chymotrypsin numbering) that contribute to substrate specificity including 195, 102, 157 (the catalytic triad); 189, 190, 191, 192, 216 and 226 (S1); 57, 58, 59, 60, 61, 62, 63, 64, 99 (S2); 146, 192, 217, 218 (S3); 96, 97, 98, 99, 1.00, 168, 169, 170, 170A, 171, 172, 173, 174, 175, 176, 178, 179, 180, 215, 217, 224 (S4). In another example, mutation of amino acid residues in a papain family protease can be in any one or more residues that affect P2 specificity (standard papain numbering) including 66-68, 133, 157, 160, and/or 215. In addition, residues that do not directly contact the protease substrate, but do affect the position and/or conformation of contact residues (such as for example those listed above) also can be mutated to alter the specificity of a protease scaffold.

[0378] In another example, focused amino acids for mutagenesis can be selected by sequence comparison of homologous proteases with similar substrate specificities. Consensus amino acid residues can be identified by alignment of the amino sequences of the homologous proteins, for example, alignment of regions of the protease that are involved in substrate binding. Typically, proteases with similar substrate specificities share consensus amino acids, for example, amino acids in the substrate binding pocket can be identical or similar between the compared proteases. Additionally, the amino acid sequences of proteases with differing substrate specificities can be compared to identify amino acids that can be involved in substrate recognition. These methods can be combined with methods, such as three-dimensional modeling, to identify target residues for mutagenesis.

[0379] In an additional example, focused mutagenesis can be restricted to amino acids that are identified as hot spots in the initial rounds of protease screening. For example, following selection of proteases from randomly mutagenized combinatorial libraries, several “hot spot” positions are typically observed and selected over and over again in the screening methods. Most often, since random mutagenesis broadly mutates a polypeptide sequence but with only a few mutations at each site, focused mutagenesis is used as a second strategy to specifically target hot spot positions for further mutagenesis. Focused mutagenesis of hot spot positions allows for a more diverse and deep mutagenesis at particular specified positions, as opposed to the more shallow mutagenesis that occurs following random mutagenesis of a polypeptide sequence. For example, saturation mutagenesis can be used to mutate “hot spots” such as by using oligos containing NNt/g or NNt/c at these positions. In one example, using the methods provided herein, the following hot spots have been identified in uPA as contributing to increased substrate specificity: 73, 80, 30, and 155, based on chymotrypsin numbering. Mutation of these positions can be achieved, such as for example, by using saturation mutagenesis of a wild-type or template protease sequence at one or more of these sites to create collections of protease mutants to be used in subsequent screenings.

### 2. Chimeric Forms of Variant Proteases

[0380] Variant proteases provided herein can include chimeric or fusion proteins. In one example, a protease fusion protein comprises at least one catalytically-active portion of a protease protein. In another example, a protease fusion protein comprises at least two or more catalytically-active portions of a protease. Within the fusion protein, the non-protease polypeptide can be fused to the N-terminus or C-terminus of the protease polypeptide. In one embodiment, the fusion protein can include a flexible peptide linker or spacer, that separates the protease from a non-protease polypeptide. In another embodiment, the fusion protein can include a tag or detectable polypeptide. Exemplary tags and detectable proteins are known in the art and include for example, but are not limited to, a histidine tag, a hemagglutinin tag, a myc tag or a fluorescent protein. In yet another embodiment, the fusion protein is a GST-protease fusion protein in which the protease sequences are fused to the N-terminus of the GST (glutathione S-transferase) sequences. Such fusion proteins can facilitate the purification of recombinant protease polypeptides. In another embodiment, the fusion protein is a Fc fusion in which the protease sequences are fused to the N-terminus of the Fc domain from immunoglobulin G. Such fusion proteins can have better pharmacodynamic properties in vivo. In another embodiment, the fusion protein is a protease protein containing a heterologous signal sequence at its N-terminus. In certain host cells (e.g., mammalian host cells), expression and/or secretion of protease can be increased through use of a heterologous signal sequence.

[0381] A protease chimeric or fusion protein can be produced by standard recombinant DNA techniques. For example, DNA fragments coding for the different polypeptide sequences are ligated together in-frame in accordance with conventional techniques, e.g., by employing blunt-ended or stagger-ended termini for ligation, restriction enzyme digestion to provide for appropriate termini, filling-in of cohesive ends as appropriate, alkaline phosphatase treatment to avoid undesirable joining, and enzymatic ligation. In another embodiment, the fusion gene can be synthesized by conventional techniques including automated DNA synthesizers. Alternatively, PCR amplification of gene fragments can be carried out using anchor primers that give rise to complementary overhangs between two consecutive gene fragments that can subsequently be annealed and reamplified to generate a chimeric gene sequence (see, e.g., Ausubel et al. (eds.) CURRENT PROTOCOLS IN MOLECULAR BIOLOGY, John Wiley & Sons, 1992). Moreover, many expression vectors are commercially available that already encode a fusion moiety (e.g., a GST polypeptide). A protease-encoding nucleic acid can be cloned into such an expression vector such that the fusion moiety is linked in-frame to the protease protein.

### 3. Combinatorial Libraries and Other Libraries

[0382] The source of compounds for the screening assays, can be collections such as libraries, including, but not limited to, combinatorial libraries. Methods for synthesizing combinatorial libraries and characteristics of such combinatorial libraries are known in the art (See generally, Combinatorial Libraries: Synthesis, Screening and Application Potential (Cortese Ed.) Walter de Gruyter, Inc., 1995; Tietze and Lieb, Curr. Opin. Chem. Biol., 2(3):363-71 (1998); Lam, Anticancer Drug Des., 12(3):145-67 (1997); Blaney and Martin, Curr. Opin. Chem. Biol., 1(1):54-9 (1997); and Schultz and Schultz, Biotechnol. Prog., 12(6):729-43 (1996)).

[0383] Methods and strategies for generating diverse libraries, including protease or enzyme libraries, including positional scanning synthetic combinatorial libraries (PSSCL), have been developed using molecular biology methods and/or simultaneous chemical synthesis methodologies (see, e.g. Georgiou, et al. (1997) Nat. Biotechnol. 15:29-34; Kim et al. (2000) Appl Environ Microbiol. 66: 788 793; MacBeath, G. P. et al. (1998) Science 279:1958-1961; Soumillion, P. L. et al. (1994) Appl. Biochem. Biotechnol. 47:175-189, Wang, C. I. et al. (1996). Methods Enzymol. 267:52-68, U.S. Pat. Nos. 6,867,010, 6,168,919, U.S. Patent Application No. 2006-0024289). The resulting combinatorial libraries potentially contain millions of compounds that can be screened to identify compounds that exhibit a selected activity.

[0384] In one example, the components of the collection or library of proteases can be displayed on a genetic package, including, but not limited to any replicable vector, such as a phage, virus, or bacterium, that can display a polypeptide moiety. The plurality of displayed polypeptides is displayed by a genetic package in such a way as to allow the polypeptide, such as a protease or catalytically active portion thereof, to bind and/or interact with a target polypeptide. Exemplary genetic packages include, but are not limited to, bacteriophages (see, e.g., Clackson et 25 al. (1991) Making Antibody Fragments Using Phage Display Libraries, Nature, 352:624-628; Glaser et al. (1992) Antibody Engineering by Condon-Based Mutagenesis in a Filamentous Phage Vector System, J. Immunol., 149:3903 3913; Hoogenboom et al. (1991) Multi-Subunit Proteins on the Surface of Filamentous Phage: Methodologies for Displaying Antibody (Fate) Heavy and 30 Light Chains, Nucleic Acids Res., 19:4133-41370), baculoviruses (see, e.g., Boublik et al., (1995) Eukaryotic Virus Display: Engineering the Major Surface Glycoproteins of the Autographa California Nuclear Polyhedrosis Virus (ACNPV) for the Presentation of Foreign Proteins on the Virus Surface, Bio/Technology, 13:1079-1084), bacteria and other suitable vectors for displaying a protein, such as a phage-displayed protease. For example bacteriophages of interest include, but are not limited to, T4 phage, M13 phage and HI phage. Genetic packages are optionally amplified such as in a bacterial host. Any of these genetic packages as well as any others known to those of skill in the art, are used in the methods provided herein to display a protease or catalytically active portion thereof.

[0385] a. Phage Display Libraries

[0386] Libraries of variant proteases, or catalytically active portions thereof, for screening can be expressed on the surfaces bacteriophages, such as, but not limited to, M13, fd, fl, T7, and λ phages (see, e.g., Santini (1998) J. Mol. Biol. 282:125-135; Rosenberg et al. (1996) Innovations 6:1-6; Houshmand et al. (1999) Anal Biochem 268:363-370, Zanghi et al. (2005) Nuc. Acid Res. 33(18)e 160:1-8). The variant proteases can be fused to a bacteriophage coat protein with covalent, non-covalent, or non-peptide bonds. (See, e.g., U.S. Pat. No. 5,223,409, Crameri et al. (1993) Gene 137:69 and WO 01/05950). Nucleic acids encoding the variant proteases can be fused to nucleic acids encoding the coat protein to produce a protease-coat protein fusion protein, where the variant protein is expressed on the surface of the bacteriophage. For example, nucleic acid encoding the variant protease can be fused to nucleic acids encoding the C-terminal domain of filamentous phase M13 Gene III (gIIIp; SEQ ID NO:512). In some examples, a mutant protease exhibiting improved display on the phage is used as a template to generate mutant phage display libraries as described herein. For example, as described in Example 8, a mutant MT-SP1 having the mutation of serine to cysteine at position corresponding to position 122 of wild-type MT-S P1, based on chymotrypsin numbering exhibits improved phage display. Hence, such a mutant can be used as the template from which to generate diversity in the library.

[0387] Additionally, the fusion protein can include a flexible peptide linker or spacer, a tag or detectable polypeptide, a protease site, or additional amino acid modifications to improve the expression and/or utility of the fusion protein. For example, addition of a protease site can allow for efficient recovery of desired bacteriophages following a selection procedure. Exemplary tags and detectable proteins are known in the art and include for example, but not limited to, a histidine tag, a hemagglutinin tag, a myc tag or a fluorescent protein. In another example, the nucleic acid encoding the protease-coat protein fusion can be fused to a leader sequence in order to improve the expression of the polypeptide. Exemplary of leader sequences include, but are not limited to, STII or OmpA. Phage display is described, for example, in Ladner et al., U.S. Pat. No. 5,223,409; Rodi et al. (2002) Curr. Opin. Chem. Biol. 6:92-96; Smith (1985) Science 228:1315-1317; WO 92/18619; WO 91/17271; WO 92/20791; WO 92/15679; WO 93/01288; WO 92/01047; WO 92/09690; WO 90/02809; de Haard et al. (1999) J. Biol. Chem. 274:18218-30; Hoogenboom et al. (1998) Immunotechnology 4:1-20; Hoogenboom et al. (2000) Immunol Today 2:371-8; Fuchs et al. (1991) Bio/Technology 9:1370-1372; Hay et al. (1992) Hum Antibod Hybridomas 3:81-85; Huse et al. (1989) Science 246:1275-1281; Griffiths et al. (1993) EMBO J. 12:725-734; Hawkins et al. (1992) J Mol Biol 226:889-896; Clackson et al. (1991) Nature 352:624-628; Gram et al. (1992) PNAS 89:3576-3580; Garrard et al. (1991) Bio/Technology 9:1373-1377; Rebar et al. (1996) Methods Enzymol. 267:129-49; Hoogenboom et al. (1991) Nuc Acid Res 19:4133-4137; and Barbas et al. (1991) PNAS 88:7978-7982.

[0388] Nucleic acids suitable for phage display, e.g., phage vectors, are known in the art (see, e.g., Andris-Widhopf et al. (2000) J Immunol Methods, 28: 159-81; Armstrong et al. (1996) Academic Press, Kay et al., Ed. pp. 35-53; Corey et al. (1993) Gene 128(1):129-34; Cwirla et al. (1990) Proc Natl Acad Sci USA 87(16):6378-82; Fowlkes et al. (1992) Biotechniques 13(3):422-8; Hoogenboom et al. (1991) Nuc Acid Res 19(15):4133-7; McCafferty et al. (1990) Nature 348(6301):552-4; McConnell et al. (1994) Gene 151(1-2):115-8; Scott and Smith (1990) Science 249(4967):386-90).

[0389] A library of nucleic acids encoding the protease-coat protein fusion proteins, typically protease variants generated as described above, can be incorporated into the genome of the bacteriophage, or alternatively inserted into in a phagemid vector. In a phagemid system, the nucleic acid encoding the display protein is provided on a phagemid vector, typically of length less than 6000 nucleotides. The phagemid vector includes a phage origin of replication so that the plasmid is incorporated into bacteriophage particles when bacterial cells bearing the plasmid are infected with helper phage, e.g. M13K01 or M13VCS. Phagemids, however, lack a sufficient set of phage genes in order to produce stable phage particles after infection. These phage genes can be provided by a helper phage. Typically, the helper phage provides an intact copy of the gene III coat protein and other phage genes required for phage replication and assembly. Because the helper phage has a defective origin of replication, the helper phage genome is not efficiently incorporated into phage particles relative to the plasmid that has a wild type origin. See, e.g., U.S. Pat. No. 5,821,047. The phagemid genome contains a selectable marker gene, e.g. Amp.sup.R or Kan.sup.R (for ampicillin or kanamycin resistance, respectively) for the selection of cells that are infected by a member of the library.

[0390] In another example of phage display, vectors can be used that carry nucleic acids encoding a set of phage genes sufficient to produce an infectious phage particle when expressed, a phage packaging signal, and an autonomous replication sequence. For example, the vector can be a phage genome that has been modified to include a sequence encoding the display protein. Phage display vectors can further include a site into which a foreign nucleic acid sequence can be inserted, such as a multiple cloning site containing restriction enzyme digestion sites. Foreign nucleic acid sequences, e.g., that encode display proteins in phage vectors, can be linked to a ribosomal binding site, a signal sequence (e.g., a M13 signal sequence), and a transcriptional terminator sequence.

[0391] Vectors can be constructed by standard cloning techniques to contain sequence encoding a polypeptide that includes a protease and a portion of a phage coat protein, and which is operably linked to a regulatable promoter. In some examples, a phage display vector includes two nucleic acid sequences that encode the same region of a phage coat protein. For example, the vector includes one sequence that encodes such a region in a position operably linked to the sequence encoding the display protein, and another sequence which encodes such a region in the context of the functional phage gene (e.g., a wild-type phage gene) that encodes the coat protein. Expression of both the wild-type and fusion coat proteins can aid in the production of mature phage by lowering the amount of fusion protein made per phage particle. Such methods are particularly useful in situations where the fusion protein is less tolerated by the phage.

[0392] Phage display systems typically utilize filamentous phage, such as M13, fd, and fl. In some examples using filamentous phage, the display protein is fused to a phage coat protein anchor domain. The fusion protein can be co-expressed with another polypeptide having the same anchor domain, e.g., a wild-type or endogenous copy of the coat protein. Phage coat proteins that can be used for protein display include (i) minor coat proteins of filamentous phage, such as gene III protein (gIIIp), and (ii) major coat proteins of filamentous phage such as gene VIII protein (gVIIIp). Fusions to other phage coat proteins such as gene VI protein, gene VII protein, or gene IX protein also can be used (see, e.g., WO 00/71694).

[0393] Portions (e.g., domains or fragments) of these proteins also can be used. Useful portions include domains that are stably incorporated into the phage particle, e.g., so that the fusion protein remains in the particle throughout a selection procedure. In one example, the anchor domain of gIIIp is used (see, e.g., U.S. Pat. No. 5,658,727 and Examples below). In another example, gVIIIp is used (see, e.g., U.S. Pat. No. 5,223,409), which can be a mature, full-length gVIIIp fused to the display protein. The filamentous phage display systems typically use protein fusions to attach the heterologous amino acid sequence to a phage coat protein or anchor domain. For example, the phage can include a gene that encodes a signal sequence, the heterologous amino acid sequence, and the anchor domain, e.g., a gIIIp anchor domain.

[0394] Valency of the expressed fusion protein can be controlled by choice of phage coat protein. For example, gIIIp proteins typically are incorporated into the phage coat at three to five copies per virion. Fusion of gIIIp to variant proteases thus produces a low-valency. In comparison, gVIII proteins typically are incorporated into the phage coat at 2700 copies per virion (Marvin (1998) Curr. Opin. Struct. Biol. 8:150-158). Due to the high-valency of gVIIIp, peptides greater than ten residues are generally not well tolerated by the phage. Phagemid systems can be used to increase the tolerance of the phage to larger peptides, by providing wild-type copies of the coat proteins to decrease the valency of the fusion protein. Additionally, mutants of gVIIIp can be used which are optimized for expression of larger peptides. In one such example, a mutant gVIIp was obtained in a mutagenesis screen for gVIIIp with improved surface display properties (Sidhu et al. (2000) J. Mol. Biol. 296:487-495).

[0395] Regulatable promoters also can be used to control the valency of the display protein. Regulated expression can be used to produce phage that have a low valency of the display protein. Many regulatable (e.g., inducible and/or repressible) promoter sequences are known. Such sequences include regulatable promoters whose activity can be altered or regulated by the intervention of user, e.g., by manipulation of an environmental parameter, such as, for example, temperature or by addition of stimulatory molecule or removal of a repressor molecule. For example, an exogenous chemical compound can be added to regulate transcription of some promoters. Regulatable promoters can contain binding sites for one or more transcriptional activator or repressor protein. Synthetic promoters that include transcription factor binding sites can be constructed and also can be used as regulatable promoters. Exemplary regulatable promoters include promoters responsive to an environmental parameter, e.g., thermal changes, hormones, metals, metabolites, antibiotics, or chemical agents. Regulatable promoters appropriate for use in E. coli include promoters which contain transcription factor binding sites from the lac, tac, trp, trc, and tet operator sequences, or operons, the alkaline phosphatase promoter (pho), an arabinose promoter such as an araBAD promoter, the rhamnose promoter, the promoters themselves, or functional fragments thereof (see, e.g., Elvin et al. (1990) Gene 37: 123-126; Tabor and Richardson, (1998) Proc. Natl. Acad. Sci. U.S. 1074-1078; Chang et al. (1986) Gene 44: 121-125; Lutz and Bujard, (1997) Nucl. Acids. Res. 25: 1203-1210; D. V Goeddel et al. (1979) Proc. Nat. Acad. Sci. U.S.A., 76:106-110; J. D. Windass et al. (1982) Nucl. Acids. Res., 10:6639-57; R. Crowl et al. (1985) Gene, 38:31-38; Brosius (1984) Gene 27: 161-172; Amanna and Brosius, (1985) Gene 40: 183-190; Guzman et al. (1992) J. Bacteriol., 174: 7716-7728; Haldimann et al. (1998) J. Bacteriol., 180: 1277-1286).

[0396] The lac promoter, for example, can be induced by lactose or structurally related molecules such as isopropyl-beta-D-thiogalactoside (IPTG) and is repressed by glucose. Some inducible promoters are induced by a process of derepression, e.g., inactivation of a repressor molecule.

[0397] A regulatable promoter sequence also can be indirectly regulated. Examples of promoters that can be engineered for indirect regulation include: the phage lambda P_{R}, P_{L}, phage T7, SP6, and T5 promoters. For example, the regulatory sequence is repressed or activated by a factor whose expression is regulated, e.g., by an environmental parameter. One example of such a promoter is a T7 promoter. The expression of the T7 RNA polymerase can be regulated by an environmentally-responsive promoter such as the lac promoter. For example, the cell can include a heterologous nucleic acid that includes a sequence encoding the T7 RNA polymerase and a regulatory sequence (e.g., the lac promoter) that is regulated by an environmental parameter. The activity of the T7 RNA polymerase also can be regulated by the presence of a natural inhibitor of RNA polymerase, such as T7 lysozyme.

[0398] In another configuration, the lambda P_{L} can be engineered to be regulated by an environmental parameter. For example, the cell can include a nucleic acid sequence that encodes a temperature sensitive variant of the lambda repressor. Raising cells to the non-permissive temperature releases the P_{L} promoter from repression.

[0399] The regulatory properties of a promoter or transcriptional regulatory sequence can be easily tested by operably linking the promoter or sequence to a sequence encoding a reporter protein (or any detectable protein). This promoter-report fusion sequence is introduced into a bacterial cell, typically in a plasmid or vector, and the abundance of the reporter protein is evaluated under a variety of environmental conditions. A useful promoter or sequence is one that is selectively activated or repressed in certain conditions.

[0400] In some embodiments, non-regulatable promoters are used. For example, a promoter can be selected that produces an appropriate amount of transcription under the relevant conditions. An example of a non-regulatable promoter is the gill promoter.

[0401] b. Cell Surface Display Libraries

[0402] Libraries of variant proteases for screening can be expressed on the surfaces of cells, for example, prokaryotic or eukaryotic cells. Exemplary cells for cell surface expression include, but are not limited to, bacteria, yeast, insect cells, avian cells, plant cells, and mammalian cells (Chen and Georgiou (2002) Biotechnol Bioeng 79: 496-503). In one example, the bacterial cells for expression are Escherichia coli.

[0403] Variant proteases can be expressed as a fusion protein with a protein that is expressed on the surface of the cell, such as a membrane protein or cell surface-associated protein. For example, a variant protease can be expressed in E. coli as a fusion protein with an E. coli outer membrane protein (e.g. OmpA), a genetically engineered hybrid molecule of the major E. coli lipoprotein (Lpp) and the outer membrane protein OmpA or a cell surface-associated protein (e.g. pili and flagellar subunits). Generally, when bacterial outer membrane proteins are used for display of heterologous peptides or proteins, it is achieved through genetic insertion into permissive sites of the carrier proteins. Expression of a heterologous peptide or protein is dependent on the structural properties of the inserted protein domain, since the peptide or protein is more constrained when inserted into a permissive site as compared to fusion at the N- or C-terminus of a protein. Modifications to the fusion protein can be done to improve the expression of the fusion protein, such as the insertion of flexible peptide linker or spacer sequences or modification of the bacterial protein (e.g. by mutation, insertion, or deletion, in the amino acid sequence). Enzymes, such as β-lacatamase and the Cex exoglucanase of Cellulomonas fimi, have been successfully expressed as Lpp-OmpA fusion proteins on the surface of E. coli (Francisco J. A. and Georgiou G. Ann NY Acad Sci. 745:372-382 (1994) and Georgiou G. et al. Protein Eng. 9:239-247 (1996)). Other peptides of 15-514 amino acids have been displayed in the second, third, and fourth outer loops on the surface of OmpA (Samuelson et al. J. Biotechnol. 96: 129-154 (2002)). Thus, outer membrane proteins can carry and display heterologous gene products on the outer surface of bacteria.

[0404] In another example, variant proteases can be fused to autotransporter domains of proteins such as the N. gonorrhoeae IgA1 protease, Serratia marcescens serine protease, the Shigella flexneri VirG protein, and the E. coli adhesin AIDA-I (Klauser et al. EMBO J. 1991-1999 (1990); Shikata S, et al. J. Biochem. 114:723-731 (1993); Suzuki T et al. J Biol. Chem. 270:30874-30880 (1995); and Maurer J et al. J. Bacteriol. 179:794-804 (1997)). Other autotransporter proteins include those present in gram-negative species (e.g. E. coli, Salmonella serovar Typhimurium, and S. flexneri). Enzymes, such as β-lactamase, have been successful expressed on the surface of E. coli using this system (Lattemann C T et al. J Bacteriol. 182(13): 3726-3733 (2000)).

[0405] Bacteria can be recombinantly engineered to express a fusion protein, such a membrane fusion protein. Nucleic acids encoding the variant proteases can be fused to nucleic acids encoding a cell surface protein, such as, but not limited to, a bacterial OmpA protein. The nucleic acids encoding the variant proteases can be inserted into a permissible site in the membrane protein, such as an extracellular loop of the membrane protein. Additionally, a nucleic acid encoding the fusion protein can be fused to a nucleic acid encoding a tag or detectable protein. Such tags and detectable proteins are known in the art and include for example, but are not limited to, a histidine tag, a hemagglutinin tag, a myc tag or a fluorescent protein. The nucleic acids encoding the fusion proteins can be operably linked to a promoter for expression in the bacteria. For example a nucleic acid can be inserted in a vector or plasmid, which can carry a promoter for expression of the fusion protein and optionally, additional genes for selection, such as for antibiotic resistance. The bacteria can be transformed with such plasmids, such as by electroporation or chemical transformation. Such techniques are known to one of ordinary skill in the art.

[0406] Proteins in the outer membrane or periplasmic space are usually synthesized in the cytoplasm as premature proteins, which are cleaved at a signal sequence to produce the mature protein that is exported outside the cytoplasm. Exemplary signal sequences used for secretory production of recombinant proteins for E. coli are known. The N-terminal amino acid sequence, without the Met extension, can be obtained after cleavage by the signal peptidase when a gene of interest is correctly fused to a signal sequence. Thus, a mature protein can be produced without changing the amino acid sequence of the protein of interest (Choi and Lee. Appl. Microbiol. Biotechnol. 64: 625-635 (2004)).

[0407] Other cell surface display systems are known in the art and include, but are not limited to ice nucleation protein (Inp)-based bacterial surface display system (Lebeault J M (1998) Nat. Biotechnol. 16: 576 80), yeast display (e.g. fusions with the yeast Aga2p cell wall protein; see U.S. Pat. No. 6,423,538), insect cell display (e.g. baculovirus display; see Ernst et al. (1998) Nucleic Acids Research, Vol 26, Issue 7 1718-1723), mammalian cell display, and other eukaryotic display systems (see e.g. U.S. Pat. No. 5,789,208 and WO 03/029456).

[0408] c. Other Display Libraries

[0409] It also is possible to use other display formats to screen libraries of variant proteases, e.g., libraries whose variation is designed as described herein. Exemplary other display formats include nucleic acid-protein fusions, ribozyme display (see e.g. Hanes and Pluckthun (1997) Proc. Natl. Acad. Sci. U.S.A. 13:4937-4942), bead display (Lam, K. S. et al. Nature (1991) 354, 82-84; K. S. et al. (1991) Nature, 354, 82-84; Houghten, R. A. et al. (1991) Nature, 354, 84-86; Furka, A. et al. (1991) Int. J. Peptide Protein Res. 37, 487-493; Lam, K. S., et al. (1997) Chem. Rev., 97, 411-448; U.S. Published Patent Application 2004-0235054) and protein arrays (see e.g. Cahill (2001) J. Immunol. Meth. 250:81-91, WO 01/40803, WO 99/51773, and US2002-0192673-A1)

[0410] In specific other cases, it can be advantageous to instead attach the proteases, variant proteases, or catalytically active portions or phage libraries or cells expressing variant proteases to a solid support. For example, in some examples, cells expressing variant proteases can be naturally adsorbed to a bead, such that a population of beads contains a single cell per bead (Freeman et al. Biotechnol. Bioeng. (2004) 86:196-200). Following immobilization to a glass support, microcolonies can be grown and screened with a chromogenic or fluorogenic substrate. In another example, variant proteases or phage libraries or cells expressing variant proteases can be arrayed into titer plates and immobilized.

### F. METHODS OF CONTACTING, ISOLATING, AND IDENTIFYING SELECTED PROTEASES

[0411] After a plurality of collections or libraries displaying proteases or catalytically active portions thereof have been chosen and prepared, the libraries are used to contact a target protease trap polypeptide with the protease components. The target substrates, including, for example, a protease trap polypeptide such as a serpin mutated in its RSL loop to have a desired cleavage sequence, are contacted with the displayed protease libraries for selection of a protease with altered substrate specificity. The protease and protease trap polypeptide can be contacted in suspension, solution, or via a solid support. The components are contacted for a sufficient time, temperature, or concentration for interaction to occur and for the subsequent cleavage reaction and formation of a stable intermediate complex of the selected protease and protease trap polypeptide. The stringency by which the reaction is maintained can be modulated by changing one or more parameters from among the temperature of the reaction, concentration of the protease trap polypeptide inhibitor, concentration of a competitor (if included), concentration of the collection of proteases in the mixture, and length of time of the incubation.

[0412] The selected proteases that form covalent complexes with the protease trap polypeptide are captured and isolated. To facilitate capture, protease trap polypeptides for screening against can be provided in solution, in suspension, or attached to a solid support, as appropriate for the assay method. For example, the protease trap polypeptide can be attached to a solid support, such as for example, one or more beads or particles, microspheres, a surface of a tube or plate, a filter membrane, and other solid supports known in the art. Exemplary solid support systems include, but are not limited to, a flat surface constructed, for example, of glass, silicon, metal, nylon, cellulose, plastic or a composite, including multiwell plates or membranes; or can be in the form of a bead such as a silica gel, a controlled pore glass, a magnetic (Dynabead) or cellulose bead. Such methods can be adapted for use in suspension or in the form of a column. Target protease trap polypeptides can be attached directly or indirectly to a solid support, such as a polyacrylamide bead. Covalent or non-covalent methods can be used for attachment. Covalent methods of attachment of target compounds include chemical crosslinking methods. Reactive reagents can create covalent bonds between functional groups on the target molecule and the support. Examples of functional groups that can be chemically reacted are amino, thiol, and carboxyl groups. N-ethylmaleimide, iodoacetamide, N-hydrosuccinimide, and glutaraldehyde are examples of reagents that react with functional groups. In other examples, target substrates can be indirectly attached to a solid support by methods such as, but not limited to, immunoaffinity or ligand-receptor interactions (e.g. biotin-streptavidin or glutathione S-transferase-glutathione). For example, a protease-trap polypeptide can be coated to an ELISA plate, or other similar addressable array. In one example, the wells of the plate can be coated with an affinity capture agent, which binds to and captures the protease-trap polypeptide. Example 9 exemplifies a method whereby biotinylated anti-His antibody is coated onto a streptavidin containing plate to facilitate capture of a protease-trap polypeptide containing a His-tag.

[0413] Attachment of the protease trap polypeptide to a solid support can be performed either before, during, or subsequent to their contact with variant proteases or phage libraries or cells expressing variant proteases. For example, target substrates can be pre-absorbed to a solid support, such as a chromatography column, prior to incubation with the variant protease. In other examples, the attachment of a solid support is performed after the target substrate is bound to the variant protease.

[0414] In such an example, the solid support containing the complexed substrate-protease pair can be washed to remove any unbound protease. The complex can be recovered from the solid support by any method known to one of skill in the art, such as for example, by treatment with dilute acid, followed by neutralization (Fu et al. (1997) J. Biol. Chem. 272:25678-25684) or with triethylamine (Chiswell et al. (1992) Trends Biotechnol. 10:80-84). This step can be optimized to ensure reproducible and quantitative recovery of the display source from the solid substrate. For example, the binding of the display source to the target substrate attached to the solid support can be monitored independently using methods well known to those of skill in the art, such as by using an antibody directed against the phage, such as against M13 phage (e.g., New England Biolabs, MA) and a standard ELISA (see e.g., Ausubel et al. (1987) Current Protocols in Molecular Biology, John Wiley & Sons, New York).

[0415] Another method of capturing and isolating a substrate-protease complex is from solution. Typically, in such a method, a protease trap polypeptide or variant thereof is contacted with a collection of proteases such as, for example, in a small volume of an appropriate binding buffer (i.e. 20, 30, 40, 50, 60, 70, 80, 90, 100, 200, 300, 400, 500 or more microliters) where each protease trap polypeptide is associated with a predetermined marker, tag, or other detectable moiety for identification and isolation thereof. The detectable moiety can be any moiety that facilitates the detection and isolation of substrate-protease complex. For example, the moiety can be an epitope tag for which an antibody specific for the tag exists (i.e. myc-tag, His-tag, or others). The antibody can be bound to a solid support, such as a bead, to facilitate capture of the stable complex. Other similar strategies can be used and include, for example, labeling of the target substrate with biotin and capture using streptavidin attached to a solid support such as magnetic beads or a microtiter plate or labeling with polyhistidine (e.g., H is 6-tag) and capture using a metal chelating agent such as, but not limited to, nickel sulphate (NiSO₄), cobalt chloride (CoCl₂), copper sulphate (CuSO₄), or zinc chloride (ZnCl₂). The capturing agents can be coupled to large beads, such as for example, sepharose beads, whereby isolation of the bound beads can be easily achieved by centrifugation. Alternatively, capturing agents can be coupled to smaller beads, such as for example, magnetic beads (i.e. Miltenyi Biotec), that can be easily isolated using a magnetic column. In addition, the moiety can be a fluorescent moiety. For example, in some display systems, such as for example, cell surface display systems, a fluorescent label can facilitate isolation of the selected complex by fluorescence activated cell sorting (FACS; see e.g., Levin et al. (2006) Molecular BioSystems, 2: 49-57).

[0416] In some instances, one or more distinct protease trap polypeptides are contacted with a collection of proteases, where each of the protease trap polypeptides are associated with different detection moieties so as to individually isolate one or more than one protease trap polypeptide-protease complex. The ability to include in a single reaction 1, 2, 3, 4, 5, 6, 7, 8, 9, 10, or more distinct protease trap polypeptides, each with a different desired RSL cleavage sequence, permits the detection and isolation of tens of hundreds or thousands of covalent complexes simultaneously.

[0417] The selected proteases, captured as covalent complexes with the protease trap polypeptide, can be separated from uncomplexed proteases from the collection of proteases. The selected proteasescan then be amplified to facilitate identification of the selected protease. After removal of any uncomplexed proteases to the protease trap polypeptide, the source of material to which the protease is displayed (i.e. phage, cells, beads, etc. . . . ) is amplified and expressed in an appropriate host cell. For example, where the protease is displayed on phage, generally, the protease-phage in complex with a protease trap polypeptide is incubated with a host cell to allow phage adsorption, followed by addition of a small volume of nutrient broth and agitation of the culture to facilitate phage probe DNA replication in the multiplying host. In some examples, this is done in the presence of helper phage in order to ensure that the host cells are infected by the phage. After this incubation, the media is supplemented with an antibiotic and/or an inducer. The phage protease genome also can contain a gene encoding resistance to the antibiotic to allow for selective growth of those bacterial cells that maintain the phage protease DNA. Typically, for amplification of phage as a source of phage supernatant containing selected proteases, rescue of the phage is required by the use of helper phage. In some examples, it is possible to assay for the presence of a selected protease without a rescue step. For example, following incubation of the captured complex containing the selected or identified protease with a host cell, for example, bacteria, and growth in the presence of a selective agent, the periplasm or cell culture medium can be directly sampled as a source of the selected protease, for example, to measure protease activity. Such a procedure is described in Example 17.

[0418] Additionally, the amplification of the display source, such as in a bacterial host, can be optimized in a variety of ways. For example, the amount of bacteria added to the assay material, such as in microwells, can be in vast excess of the phage source recovered from the binding step thereby ensuring quantitative transduction of the phage genome. The efficiency of transduction optionally can be measured when phage are selected. The amplification step amplifies the genome of the display source, such as phage genomes, allowing over-expression of the associated signature polypeptide and identification thereof, such as by DNA sequencing.

[0419] A panning approach can be used whereby proteases or catalytically active portions thereof that interact with a target protein, such as a protease trap polypeptide or RSL variant thereof, are quickly selected. Panning is carried out, for example, by incubating a library of phage-displayed polypeptides, such as phage-displayed proteases, with a surface-bound or soluble target protein, washing away the unbound phage, and eluting the specifically and covalently-bound phage. The eluted phage is then amplified, such as via infection of a host, and taken through additional cycles of panning and amplification to successively enrich the pool of phage for those with the highest affinities for the target polypeptide. After several rounds, individual clones are identified, such as by DNA sequencing, and their activity can be measured, such as by any method set forth in Section G below.

[0420] Once the selected protease is identified, it can be purified from the display source and tested for activity. Generally, such methods include general biochemical and recombinant DNA techniques and are routine to those of skill in the art. In one method, polyethylene glycol (PEG) precipitation can be used to remove potentially contaminating protease activity in the purified selected phage supernatants. In such an example, following phage rescue in the presence of helper phage, phage supernatant containing the selected protease can be precipitated in the presence of PEG. One of skill in the art is able to determine the percentage of PEG required for the particular precipitation application. Generally, for precipitation of protease supernatants, 20% PEG is used.

[0421] In some examples, the supernatant, either from the rescued phage supernatant, or from the bacterial cell periplasm or cell medium (without phage rescue) can be assayed for protease activity as described herein. Alternatively or additionally, the selected protease can be purified from the supernatant or other source. For example, DNA encoding the selected protease domain can be isolated from the display source to enable purification of the selected protein. For example, following infection of E. coli host cells with selected phage as set forth above, the individual clones can be picked and grown up for plasmid purification using any method known to one of skill in the art, and if necessary can be prepared in large quantities, such as for example, using the Midi Plasmid Purification Kit (Qiagen). The purified plasmid can used for DNA sequencing to identify the sequence of the variant protease, or can be used to transfect into any cell for expression, such as but not limited to, a mammalian expression system. If necessary, one or two-step PCR can be performed to amplify the selected sequence, which can be subcloned into an expression vector of choice. The PCR primers can be designed to facilitate subcloning, such as by including the addition of restriction enzyme sites. Example 4 exemplifies a two step PCR procedure to accomplish amplification and purification of the full-length u-PA gene, where the selected protease phage contained only the protease domain of the u-PA gene. Following transfection into the appropriate cells for expression such as is described in detail below, conditioned medium containing the protease polypeptide, or catalytically active portion thereof can be tested in activity assays or can be used for further purification. In addition, if necessary, the protease can be processed accordingly to yield an active protease, such as by cleavage of a single chain form, into a two chain form. Such manipulations are known to one of skill in the art. For example, single chain u-PA can be made active the cleavage of plasmin such as is described herein.

### 1. Iterative Screening

[0422] In the methods provided herein, iterative screening is employed to optimize the modification of the proteases. Thus, in methods of iterative screening, a protease can be evolved by performing the panning reactions a plurality of times under various parameters, such as for example, by using different protease trap polypeptides or competitors. In such methods of iterative screening, the protease collection can be kept constant in successive rounds of screening. Alternatively, a new protease collection can be generated containing only the selected proteases identified in the preceding rounds and/or by creating a new collection of mutant proteases that have been further mutated as compared to a template protease identified in the first round.

[0423] In one example, a first round screening of the protease library can identify variant proteases containing one or more mutations which alter the specificity of the protease. A second round library synthesis can then be performed in which the amino acid positions of the one or mutations are held constant, and focused or random mutagenesis is carried out on the remainder of the protein or desired region or residue. After an additional round of screening, the selected protease can be subjected to additional rounds of library synthesis and screening. For example, 2, 3, 4, 5, or more rounds of library synthesis and screening can be performed. In some examples, the specificity of the variant protease toward the altered substrate is further optimized with each round of selection.

[0424] In another method of iterative screening, a first round screening of a protease collection can be against an intermediate protease trap polypeptide to identify variant proteases containing one or more mutations which alter the specificity of the protease to the intermediate substrate. The selected protease complexes can be isolated, grown up, and amplified in the appropriate host cells and used as the protease collection in a second round of screening against a protease trap polypeptide containing the complete cleavage sequence of a target polypeptide. For example, such an approach can be used to select for proteases having substrate specificity for a VEGFR cleavage sequence where the one or more rounds of panning are against a RRARM intermediate cleavage sequence, and subsequent rounds of panning are performed against a protease trap polypeptide containing the VEGFR2 cleavage sequence RRVR.

[0425] In an additional example of iterative screening, two or more protease trap polypeptides containing different substrate recognition or cleavage sequences for two or more different polypeptides are used in the methods in alternative rounds of panning. Such a method is useful to select for proteases that are optimized to have selectivity for two different substrates. The selected variants typically have narrow specificity, but high activity towards two or more substrate recognition sequences. In such methods, a first round screening of a protease collection against a first protease trap polypeptide, that has been modified to select for a protease with a first predetermined substrate specificity, can identify variant proteases containing one or more mutations which alter the specificity of the protease. The selected proteases can be isolated, grown up, and amplified in the appropriate host cells and used as the protease collection in a second round of screening against a second protease trap polypeptide that has been modified to select for a protease with a second predetermined substrate specificity. The first and second protease trap polypeptide used in the methods can be the same or different, but each is differently modified in its reactive site to mimic a substrate recognition site (i.e. cleavage sequence) of different target substrates. In some examples, the stringency in the selection can be enhanced in the presence of competitors, such as for example, narrow or broad competitors as described herein.

### 2. Exemplary Selected Proteases

[0426] Provided herein are variant u-PA and MT-SP1 polypeptides identified in the methods provided herein as having an altered and/or improved substrate specificity. Such variant u-PA and MT-SP1 polypeptides were identified as having an increased specificity for a selected or desired cleavage sequence of a target protein. Exemplary of such target proteins include, but are not limited to, a cleavage sequence in a VEGFR or a complement protein, for example, complement protein C2. Any modified serpin can be used in the selection methods herein to identify variant proteases. Exemplary of such modified serpins are PAI-1 or AT3 modified in their RSL to contain cleavage sequences for a target protein, for example, a VEGFR or C2, as described herein above. The resulting selected modified proteases exhibit altered, typically improved, substrate specificity for the cleavage sequence in the target protein as compared to the template or starting protease, which does not contain the selected modifications. As described below, specificity is typically increased and is generally at least 2-fold, at least 4-fold, at least 5-fold, at least 6-fold, at least 7-fold, 8, 9, 10, 20, 30, 40, 50, 60, 70, 80, 90, 100, 200, 300, 400, 500, 600, 700, 800, 900, 1000 times or more when compared to the specificity of a wild-type or template protease for the target substrate selected against versus a non-target substrate.

[0427] a. Variant u-PA Polypeptides

[0428] For example, variant u-PA polypeptides provided herein were selected for to have an increased reactivity for a mutant serpin polypeptide modified in its RSL sequence by replacement of the native P4-P1′ reactive site amino acids with those of a desired or selected target protein. In one example, variant u-PA polypeptides were identified against selection of a modified PAI-1 polypeptide. Examples of modified PAI-1 polypeptide molecules used in the u-PA selection methods provided herein include, for example, PAI-1 modified in its native P4-P1′ residues VSARM (SEQ ID NO:378) with amino acid residues for an intermediate VEGFR-2 cleavage sequence RRARM (SEQ ID NO:379), where the desired cleavage sequence in the P4-P1 positions is the VEGFR-2 cleavage sequence RRVR (SEQ ID NO:489), or with amino acid residues for the optimal t-PA cleavage sequence PFGRS (SEQ ID NO:389).

[0429] Using the methods provided herein, the following positions were identified as contributing to substrate specificity of a u-PA polypeptide: 21, 24, 30, 38, 39, 61(A), 72, 73, 75, 80, 82, 84, 89, 92, 132, 133, 137, 138, 155, 156, 158, 159, 160, 187, and 217, based on chymotrypsin numbering. Amino acid replacement or replacements can be at any one or more positions corresponding to any of the following positions F21, I24, F30, V38, T39, Y61(A), R72, L73, S75, E80, K82, E84, I89, K92, F132, G133, E137, I138, L155, K156, T158, V159, V160, K187, and R217 of a u-PA polypeptide, such as a u-PA polypeptide set forth in SEQ ID NO:433 or catalytically active portion thereof, based on chymotrypsin numbering. A modified u-PA polypeptide provided herein that exhibits increased substrate specificity can contain one or more amino acid modifications corresponding to any one or more modification of F21V, I24L, F30I, F30V, F30L, F30T, F30G, F30M, V38D, T39A, Y61(A)H, R72G, L73A, L73P, S75P, E80G, K82E, E84K, I89V, K92E, F132L, G133D, E137G, I138T, L155P, L155V, L155M, K156Y, T158A, V159A, V160A, K187E, and R217C of a u-PA polypeptide, such as a u-PA polypeptide set forth in SEQ ID NO:433 or catalytically active portion thereof, based on chymotrypsin numbering.

[0430] In one example, a modified u-PA polypeptide provided herein having increased substrate specificity for a VEGFR-2 cleavage sequence contains one or more amino acid modifications corresponding to any one or more modifications of V38D, F30I, F30T, F30L, F30V, F30G, F30M, R72G, L73A, L73P, S75P, I89V, F132L, G133D, E137G, I138T, L155P, L155V, L155M, V160A, and R217C, based on chymotrypsin numbering. Exemplary of such polypeptides are those u-PA polypeptides containing one or more amino acid modifications corresponding to any of F30I; L73A/I89V; L73P; R217C; L155P; S75P/I89V/I138T; E137G; R72G/L155P; G133D; V160A; V38D; F132L/V160A; L73A/I89V/F30T; L73A/I89V/F30L; L73A/I89V/F30V; L73A/I89V/F30G; L73A/I89V/L155V; L73A/I89V/F30M; L73A/I89V/L155M; L73A/I89V/F30L/L155M; and L73A/I89V/F30G/L155M in a u-PA polypeptide, such as a u-PA polypeptide having an amino acid sequence set forth in SEQ ID NO:433 or a catalytically active fragment thereof. Exemplary of such sequences are those set forth in any of SEQ ID NOS: 434-459, or fragments thereof of contiguous amino acids containing the mutation and having catalytic activity. In particular, modified u-PA polypeptides having the following amino acid modifications are provided: L73A/I89V; L155P; R72G/L155P; F132L/V160A; L73A/I89V/F30T; L73A/I89V/L155V; L73A/I89V/L155M; and L73A/I89V/F30L/L155M, based on chymotrypsin numbering.

[0431] In another example, a modified u-PA polypeptide provided herein having increased specificity for a cleavage sequence recognized by t-PA contains one or more amino acid modifications corresponding to any one or more modifications of F21V, I24L, F30V, F30L, T39A, Y61(A)H, E80G, K82E, E84K, I89V, K92E, K156T, T158A, V159A, and K187E, based on chymotrypsin numbering. Exemplary of such polypeptides are those u-PA polypeptides containing one or more amino acid modifications corresponding to any of F21V; I24L; F30V; F30L; F30V/Y61(A)H; F30V/K82E; F30V/K156T; F30V/K82E/V159A; F30V/K82E/T39A/V159A; F30V/K82E/T158A/V159A; F30V/Y61(A)H/K92E; F30V/K82E/V159A/E80G/I89V/K187E; and F30V/K82E/V159A/E80G/E84K/I89V/K187E, in a u-PA polypeptide, such as a u-PA polypeptide having an amino acid sequence set forth in SEQ ID NO:433 or a catalytically active fragment thereof. Exemplary of such sequences are those set forth in any of SEQ ID NOS:460-472, or fragments thereof of contiguous amino acids containing the mutation and having catalytic activity.

[0432] Also provided herein are variant proteases of the chymotrypsin family having the corresponding mutation as compared to the variant u-PA polypeptides provided herein, based on chymotrypsin numbering. For example, based on chymotrypsin numbering, modification of position F30 in u-PA corresponds to modification of position Q30 in t-PA, Q30 in trypsin, and Q30 in chymotrypsin (Bode et al. (1997) Current Opinion in Structural Biology, 7: 865-872). One of skill in the art could determine corresponding mutations in any other chymotrypsin family member, including but not limited to modification of any protease set forth in Table 7 and having a sequence of amino acids set forth in any of SEQ ID NOS: 40, 42, 44, 46, 48, 50, 52, 54, 56, 58, 60, 62, 64, 66, 68, 70, 72, 74, 76, 78, 80, 82, 84, 86, 88, 90, 92, 94, 96, 98, 99, 101, 103, 105, 107, 109, 111, 113, 115, 117, 119, 121, 123, 125, 127, 129, 131, 133, 135, 137, 139, 141, 143, 145, 147, 149, 151, 153, 155, 157, 159, 161, 163, 165, 167, 169, 171, 173, 175, 177, 179, 181, 183, 185, 187, 189, 193, 195, 197, 199, 201, 203, 205, 207, 209, 211, 213, 215, 217, 219, 221, 223, 225, 227, 229, 231, 233, 235, 237, 239, 241, 242, 243, 245, 247, 249, 251, 253, 255, 257, 259, 261, 262, 264, 266, 268, 270, 272, or catalytically active fragments thereof.

[0433] b. Variant MT-SP1 Polypeptides

[0434] In another example, variant MT-SP 1 polypeptides provided herein were selected for to have an increased reactivity for a mutant serpin polypeptide modified in its RSL sequence by replacement of the native P4-P2′ reactive site amino acids with those of a desired or selected target protein. In one example, variant MT-SP 1 polypeptides were identified against selection of a modified AT3 polypeptide. Examples of modified AT3 polypeptide molecules used in the MT-SP 1 selection methods provided herein include, for example, AT3 modified in its native P4-P2′ residues IAGRSL (SEQ ID NO:478) with amino acid residues for a complement protein C2 cleavage sequence SLGRKI (SEQ ID NO:479).

[0435] Using the methods provided herein, the following positions were identified as contributing to substrate specificity of an MT-SP1 polypeptide: 23, 41, 52, 60(g), 65, 71, 93, 95, 97, 98, 99, 126, 129, 131, 136, 143, 144, 154, 164, 166, 171, 173, 175, 184(a), 192, 201, 209, 217, 221(a), 230, 234, and 244, based on chymotrypsin numbering. Amino acid replacement or replacements can be at any one or more positions corresponding to any of the following positions D23, I41, L52, Y60(g), T65, H71, F93, N95, F97, I98, F99, A126, V129, P131, I136, H143, T144, I154, N164, T166, L171, P173, Q175, F184(a), Q192, S201, Q209, D217, Q221(a), R230, F234, and V244 of an MT-SP1 polypeptide, such as full-length MT-S P1 polypeptide set forth in SEQ ID NO:253 or 515 or catalytically active portion thereof set forth in SEQ ID NO:505 or 507, based on chymotrypsin numbering. A modified MT-SP1 polypeptide provided herein that exhibits increased substrate specificity can contain one or more amino acid modifications corresponding to any one or more modification of D23E, I41F, I41T, L52M, Y60(g)s, T56K, H71R, F93L, N95K, F97Y, F97L, T98P, F99L, A126T, V129D, P131S, I136T, I136V, H143R, T144I, I154V, N164D, T166A, L171F, P173S, Q175R, F184(a)L, Q192H, S201I, Q209L, D217V, Q221(a)L, R230W, F234L, and V244G of an MT-SP1 polypeptide, such as full-length MT-SP1 polypeptide set forth in SEQ ID NO:253 or 515 or catalytically active portion thereof set forth in SEQ ID NO:505 or 507, based on chymotrypsin numbering. In particular, a modified MT-SP1 polypeptide contains one or more amino acid modifications corresponding to any one or more modification of I41F, F97Y, L171F, Q175R, D217V and V244G, for example, any one or more of I41F, F97Y, L171F and V244G.

[0436] Typically, such a modified MT-SP1 polypeptide exhibits increased substrate specificity for complement protein C2. Exemplary of such polypeptides are those MT-S P1 polypeptides containing one or more amino acid modifications corresponding to any of I136T/N164D/T166A/F184(A)L/D217V; I41F; I41F/A126T/V244G; D23E/I41F/T98P/T144I; I41F/L171F/V244G; H143R/Q175R; 141F/L171F; R230W; I41F/I154V/V244G; I141F/L52M/V129D/Q221(A)L; F99L; F97Y/I136V/Q192H/S201I; H71R/P131S/D217V; D217V; T65K/F93L/F97Y/D217V; I41T/P173S/Q209L; F97L/F234L; Q175R; N95K; and Y60(G)S in an MT-SP1 polypeptide, such as an MT-S P1 polypeptide having an amino acid sequence set forth in SEQ ID NO:253 or a catalytically active fragment thereof set forth in SEQ ID NO:505. Exemplary of such sequences are those set forth in any of SEQ ID NOS: 589-609, or fragments thereof of contiguous amino acids containing the mutation and having catalytic activity such as, for example, any set forth in any of SEQ ID NOS: 568-588. In some examples, the variant MT-SP1 polypeptides provided herein additionally contain a modification corresponding to C122S in an MT-SP1 polypeptide such as an MT-SP1 polypeptide having an amino acid sequence set forth in SEQ ID NO:253 or a catalytically active fragment thereof set forth in SEQ ID NO:505. Exemplary of such variant MT-SP1 polypeptides are set forth in any of SEQ ID NOS: 537-557, or fragments thereof of contiguous amino acids containing the mutation and having catalytic activity such as, for example, any set forth in any of SEQ ID NOS: 516-536.

[0437] In particular, modified u-PA polypeptides having the following amino acid modifications are provided: L73A/I89V; L155P; R72G/L155P; F132L/V160A; L73A/I89V/F30T; L73A/I89V/L155V; L73A/I89V/L155M; and L73A/I89V/F30L/L155M, based on chymotrypsin numbering.

### G. METHODS OF ASSESSING PROTEASE ACTIVITY AND SPECIFICITY

[0438] Proteases selected in the methods provided herein can be tested to determine if, following selection, the proteases retain catalytic efficiency and exhibit the desired substrate specificity. Activity assessment can be performed using supernatant from the amplified display source or from purified protein. For example, as discussed above, phage supernatant can be assayed following rescue of phage with helper phage and phage amplification. Alternatively, protease activity can be assayed directly from the cell medium or periplasm of infected bacteria. Protease activity of the purified selected protease also can be determined.

[0439] Catalytic efficiency and/or substrate specificity can be assessed by assaying for substrate cleavage using known substrates of the protease. For example, cleavage of plasminogen can be assessed in the case where t-PA or u-Pa are used in the selection method herein. In another example, a peptide substrate recognized by the protease can be used. For example, RQAR (SEQ ID NO:513), which is the autoactivation site of MT-SP1, can be used to assess the activity of selected MT-SP 1 proteases. In one embodiment, a fluorogenically tagged tetrapeptide of the peptide substrate can be used, for example, an ACC- or AMC-tetrapeptide. In addition, a fluorogenic peptide substrates designed based on the cleavage sequence of a desired target substrate for which the protease was selected against can be used to assess activity.

[0440] In some examples, the selected protease can be assessed for its activity against a known peptide substrate in the presence or absence of the variant protease trap polypeptide used in the selection method. Typically, such an activity assessment is performed in order to further select for those proteases that are inhibited in the presence of protease trap polypeptide containing the desired cleavage sequence of the target substrate, and thereby optimize for selected proteases having improved selectivity for the target substrate. Comparisons of inhibition can be made against the wild-type or template protease and/or with all other proteases identified in the selection method.

[0441] Kinetic analysis of cleavage of native substrates of a selected protease can be compared to analysis of cleavage of desired target substrates to assess specificity of the selected protease for the target sequence. In addition, second order rate constants of inhibition (ki) can be assessed to monitor the efficiency and reactivity of a selected protease for a substrate, such as for example, the protease trap polypeptide, or variant thereof, used in the selection method. Example 5 exemplifies various assays used to assess the catalytic efficiency and reactivity of mutant u-PA polypeptides identified in the methods provided herein. Example 10 and Example 12 exemplify various assays used to assess the catalytic efficiency of selected MT-S P1 phage supernatants. Example 14 exemplifies various assays used to assess the catalytic efficiency and reactivity of selected purified variant MT-SP 1 proteases.

[0442] In one example, selected proteases, such as for example selected u-PA or MT-SP1 proteases, that are selected to match the desired specificity profile of the mutated protease trap polypeptide, can be assayed using individual fluorogenic peptide substrates corresponding to the desired cleavage sequence. For example, a method of assaying for a modified protease that can cleave any one or more of the desired cleavage sequences of a target substrate includes: (a) contacting a peptide fluorogenic sample (containing a desired target cleavage sequence) with a protease, in such a manner whereby a fluorogenic moiety is released from a peptide substrate sequence upon action of the protease, thereby producing a fluorescent moiety; and (b) observing whether the sample undergoes a detectable change in fluorescence, the detectable change being an indication of the presence of the enzymatically active protease in the sample. In such an example, the desired cleavage sequence for which the protease was selected against is made into a fluorogenic peptide by methods known in the art. In one embodiment, the individual peptide cleavage sequences can be attached to a fluorogenically tagged substrate, such as for example an ACC or AMC fluorogenic leaving group, and the release of the fluorogenic moiety can be determined as a measure of specificity of a protease for a peptide cleavage sequence. The rate of increase in fluorescence of the target cleavage sequence can be measured such as by using a fluorescence spectrophotometer. The rate of increase in fluorescence can be measured over time. Michaelis-Menton kinetic constants can be determined by the standard kinetic methods. The kinetic constants k_{cat}, Kₘ and k_{cat}/Kₘ can be calculated by graphing the inverse of the substrate concentration versus the inverse of the velocity of substrate cleavage, and fitting to the Lineweaver-Burk equation (1/velocity=(Kₘ/Vₘₐₓ)(1/[S])+1/Vₘₐₓ; where Vₘₐₓ=[ET]k_{cat}). The second order rate constant or specificity constant (k_{cat}/Kₘ) is a measure of how well a substrate is cut by a particular protease. For example, an ACC- or AMC-tetrapeptide such as Ac-RRAR-AMC, Ac-SLGR-AMC, Ac-SLGR-ACC, Ac-RQAR-ACC, can be made and incubated with a protease selected in the methods provided herein and activity of the protease can be assessed by assaying for release of the fluorogenic moiety. The choice of the tetrapeptide depends on the desired cleavage sequence to by assayed for and can be empirically determined.

[0443] Assaying for a protease in a solution simply requires adding a quantity of the stock solution to a protease to a fluorogenic protease indicator peptide and measuring the subsequent increase in fluorescence or decrease in excitation band in the absorption spectrum. The solution and the fluorogenic indicator also can be combined and assayed in a “digestion buffer” that optimizes activity of the protease. Buffers suitable for assaying protease activity are well known to those of skill in the art. In general, a buffer is selected with a PH which corresponds to the PH optimum of the particular protease. For example, a buffer particularly suitable for assaying elastase activity contains 50 mM sodium phosphate, 1 mM EDTA at pH 8.9. The measurement is most easily made in a fluorometer, an instrument that provides an “excitation” light source for the fluorophore and then measures the light subsequently emitted at a particular wavelength. Comparison with a control indicator solution lacking the protease provides a measure of the protease activity. The activity level can be precisely quantified by generating a standard curve for the protease/indicator combination in which the rate of change in fluorescence produced by protease solutions of known activity is determined.

[0444] While detection of fluorogenic compounds can be accomplished using a fluorometer, detection can be accomplished by a variety of other methods well known to those of skill in the art. Thus, for example, when the fluorophores emit in the visible wavelengths, detection can be simply by visual inspection of fluorescence in response to excitation by a light source. Detection also can be by means of an image analysis system utilizing a video camera interfaced to a digitizer or other image acquisition system. Detection also can be by visualization through a filter, as under a fluorescence microscope. The microscope can provide a signal that is simply visualized by the operator. Alternatively, the signal can be recorded on photographic film or using a video analysis system. The signal also can simply be quantified in real time using either an image analysis system or a photometer.

[0445] Thus, for example, a basic assay for protease activity of a sample involves suspending or dissolving the sample in a buffer (at the pH optima of the particular protease being assayed) adding to the buffer a fluorogenic protease peptide indicator, and monitoring the resulting change in fluorescence using a spectrofluorometer as shown in e.g., Harris et al., (1998) J Biol Chem 273:27364. The spectrofluorometer is set to excite the fluorophore at the excitation wavelength of the fluorophore. The fluorogenic protease indicator is a substrate sequence of a protease that changes in fluorescence due to a protease cleaving the indicator.

[0446] Selected proteases also can be assayed to ascertain that they will cleave the desired sequence when presented in the context of the full-length protein. In one example, a purified target protein, i.e. VEGFR2 or complement protein C2, can be incubated in the presence or absence of a selected protease and the cleavage event can be monitored by SDS-PAGE followed by Coomassie Brilliant Blue staining for protein and analysis of cleavage products using densitometry. The specificity constant of cleavage of a full length protein by a protease can be determined by using gel densitometry to assess changes in densitometry over time of a full-length target substrate band incubated in the presence of a protease. In addition, the activity of the target protein also can be assayed using methods well known in the art for assaying the activity of a desired target protein, to verify that its function has been destroyed by the cleavage event.

[0447] In specific embodiments, comparison of the specificities of a selected protease, typically a modified protease, can be used to determine if the selected protease exhibits altered, for example, increased, specificity compared to the wild-type or template protease. The specificity of a protease for a target substrate can be measured by observing how many disparate sequences a modified protease cleaves at a given activity compared to a wild-type or template protease. If the modified protease cleaves fewer target substrates than the wildtype protease, the modified protease has greater specificity than the wild-type protease for those target substrates. The specificity of a protease for a target substrate can be determined from the specificity constant of cleavage of a target substrate compared to a non-target substrate (i.e. a native wildtype substrate sequence of a protease). A ratio of the specificity constants of a modified protease for a target substrate versus a non-target substrate can be made to determine a ratio of the efficiency of cleavage of the protease. Comparison of the ratio of the efficiency of cleavage between a modified protease and a wild-type or template protease can be used to assess the fold change in specificity for a target substrate. Specificity can be at least 2-fold, at least 4-fold, at least 5-fold, at least 6-fold, at least 7-fold, 8, 9, 10, 20, 30, 40, 50, 60, 70, 80, 90, 100, 200, 300, 400, 500, 600, 700, 800, 900, 1000 times or more when compared to the specificity of a wild-type or template protease for a target substrate versus a non-target substrate.

### H. METHODS OF PRODUCING NUCLEIC ACIDS ENCODING PROTEASE TRAP POLYPEPTIDES (I.E. SERPINS) OR VARIANTS THEREOF OR PROTEASES/MODIFIED PROTEASES

[0448] Polypeptides set forth herein, including protease trap polypeptides or protease polypeptides or catalytically active portions thereof, including modified u-PA polypeptides or modified MT-SP1 polypeptides, can be obtained by methods well known in the art for protein purification and recombinant protein expression. Any method known to those of skill in the art for identification of nucleic acids that encode desired genes can be used. Any method available in the art can be used to obtain a full length (i.e., encompassing the entire coding region) cDNA or genomic DNA clone encoding a desired protease trap polypeptide or protease protein, such as from a cell or tissue source. Modified polypeptides, such as variant protease trap polypeptides or selected variant proteases, can be engineered as described herein from a wildtype polypeptide, such as by site-directed mutagenesis.

[0449] Polypeptides can be cloned or isolated using any available methods known in the art for cloning and isolating nucleic acid molecules. Such methods include PCR amplification of nucleic acids and screening of libraries, including nucleic acid hybridization screening, antibody-based screening and activity-based screening.

[0450] Methods for amplification of nucleic acids can be used to isolate nucleic acid molecules encoding a desired polypeptide, including for example, polymerase chain reaction (PCR) methods. A nucleic acid containing material can be used as a starting material from which a desired polypeptide-encoding nucleic acid molecule can be isolated. For example, DNA and mRNA preparations, cell extracts, tissue extracts, fluid samples (e.g. blood, serum, saliva), samples from healthy and/or diseased subjects can be used in amplification methods. Nucleic acid libraries also can be used as a source of starting material. Primers can be designed to amplify a desired polypeptide. For example, primers can be designed based on expressed sequences from which a desired polypeptide is generated. Primers can be designed based on back-translation of a polypeptide amino acid sequence. Nucleic acid molecules generated by amplification can be sequenced and confirmed to encode a desired polypeptide.

[0451] Additional nucleotide sequences can be joined to a polypeptide-encoding nucleic acid molecule, including linker sequences containing restriction endonuclease sites for the purpose of cloning the synthetic gene into a vector, for example, a protein expression vector or a vector designed for the amplification of the core protein coding DNA sequences. Furthermore, additional nucleotide sequences specifying functional DNA elements can be operatively linked to a polypeptide-encoding nucleic acid molecule. Examples of such sequences include, but are not limited to, promoter sequences designed to facilitate intracellular protein expression, and secretion sequences designed to facilitate protein secretion. Additional nucleotide residues sequences such as sequences of bases specifying protein binding regions also can be linked to protease-encoding nucleic acid molecules. Such regions include, but are not limited to, sequences of residues that facilitate or encode proteins that facilitate uptake of a protease into specific target cells, or otherwise alter pharmacokinetics of a product of a synthetic gene.

[0452] In addition, tags or other moieties can be added, for example, to aid in detection or affinity purification of the polypeptide. For example, additional nucleotide residues sequences such as sequences of bases specifying an epitope tag or other detectable marker also can be linked to protease-encoding nucleic acid molecules or to a serpin-encoding nucleic acid molecule, or variants thereof. Exemplary of such sequences and nucleic acid sequences encoding a His tag (e.g., 6×His, HHHHH; SEQ ID NO:496) or Flag Tag (DYKDDDDK; SEQ ID NO:495).

[0453] The identified and isolated nucleic acids can then be inserted into an appropriate cloning vector. A large number of vector-host systems known in the art can be used. Possible vectors include, but are not limited to, plasmids or modified viruses, but the vector system must be compatible with the host cell used. Such vectors include, but are not limited to, bacteriophages such as lambda derivatives, or plasmids such as pCMV4, pBR322 or pUC plasmid derivatives or the Bluescript vector (Stratagene, La Jolla, Calif.). The insertion into a cloning vector can, for example, be accomplished by ligating the DNA fragment into a cloning vector which has complementary cohesive termini. Insertion can be effected using TOPO cloning vectors (INVITROGEN, Carlsbad, Calif.). If the complementary restriction sites used to fragment the DNA are not present in the cloning vector, the ends of the DNA molecules can be enzymatically modified. Alternatively, any site desired can be produced by ligating nucleotide sequences (linkers) onto the DNA termini; these ligated linkers can contain specific chemically synthesized oligonucleotides encoding restriction endonuclease recognition sequences. In an alternative method, the cleaved vector and protein gene can be modified by homopolymeric tailing. Recombinant molecules can be introduced into host cells via, for example, transformation, transfection, infection, electroporation and sonoporation, so that many copies of the gene sequence are generated.

[0454] In specific embodiments, transformation of host cells with recombinant DNA molecules that incorporate the isolated protein gene, cDNA, or synthesized DNA sequence enables generation of multiple copies of the gene. Thus, the gene can be obtained in large quantities by growing transformants, isolating the recombinant DNA molecules from the transformants and, when necessary, retrieving the inserted gene from the isolated recombinant DNA.

### 1. Vectors and Cells

[0455] For recombinant expression of one or more of the desired proteins, such as any described herein, the nucleic acid containing all or a portion of the nucleotide sequence encoding the protein can be inserted into an appropriate expression vector, i.e., a vector that contains the necessary elements for the transcription and translation of the inserted protein coding sequence. The necessary transcriptional and translational signals also can be supplied by the native promoter for protease genes, and/or their flanking regions.

[0456] Also provided are vectors that contain a nucleic acid encoding the protease or modified protease. Cells containing the vectors also are provided. The cells include eukaryotic and prokaryotic cells, and the vectors are any suitable for use therein.

[0457] Prokaryotic and eukaryotic cells, including endothelial cells, containing the vectors are provided. Such cells include bacterial cells, yeast cells, fungal cells, Archea, plant cells, insect cells and animal cells. The cells are used to produce a protein thereof by growing the above-described cells under conditions whereby the encoded protein is expressed by the cell, and recovering the expressed protein. For purposes herein, for example, the protease can be secreted into the medium.

[0458] In one embodiment, vectors containing a sequence of nucleotides that encodes a polypeptide that has protease activity, such as encoding any of the u-PA variant polypeptide provided herein, and contains all or a portion of the protease domain, or multiple copies thereof, are provided. Also provided are vectors that contain a sequence of nucleotides that encodes the protease domain and additional portions of a protease protein up to and including a full length protease protein, as well as multiple copies thereof. The vectors can be selected for expression of the modified protease protein or protease domain thereof in the cell or such that the protease protein is expressed as a secreted protein. When the protease domain is expressed, the nucleic acid is linked to a nucleic acid encoding a secretion signal, such as the Saccharomyces cerevisiae mating factor signal sequence or a portion thereof, or the native signal sequence.

[0459] A variety of host-vector systems can be used to express the protein coding sequence. These include but are not limited to mammalian cell systems infected with virus (e.g. vaccinia virus, adenovirus and other viruses); insect cell systems infected with virus (e.g. baculovirus); microorganisms such as yeast containing yeast vectors; or bacteria transformed with bacteriophage, DNA, plasmid DNA, or cosmid DNA. The expression elements of vectors vary in their strengths and specificities. Depending on the host-vector system used, any one of a number of suitable transcription and translation elements can be used.

[0460] Any methods known to those of skill in the art for the insertion of DNA fragments into a vector can be used to construct expression vectors containing a chimeric gene containing appropriate transcriptional/translational control signals and protein coding sequences. These methods can include in vitro recombinant DNA and synthetic techniques and in vivo recombinants (genetic recombination). Expression of nucleic acid sequences encoding protein, or domains, derivatives, fragments or homologs thereof, can be regulated by a second nucleic acid sequence so that the genes or fragments thereof are expressed in a host transformed with the recombinant DNA molecule(s). For example, expression of the proteins can be controlled by any promoter/enhancer known in the art. In a specific embodiment, the promoter is not native to the genes for a desired protein. Promoters which can be used include but are not limited to the SV40 early promoter (Bernoist and Chambon, Nature 290:304-310 (1981)), the promoter contained in the 3′ long terminal repeat of Rous sarcoma virus (Yamamoto et al. Cell 22:787-797 (1980)), the herpes thymidine kinase promoter (Wagner et al., Proc. Natl. Acad. Sci. USA 78:1441-1445 (1981)), the regulatory sequences of the metallothionein gene (Brinster et al., Nature 296:39-42 (1982)); prokaryotic expression vectors such as the β-lactamase promoter (Jay et al., (1981) Proc. Natl. Acad. Sci. USA 78:5543) or the tac promoter (DeBoer et al., Proc. Natl. Acad. Sci. USA 80:21-25 (1983)); see also “Useful Proteins from Recombinant Bacteria”: in Scientific American 242:79-94 (1980)); plant expression vectors containing the nopaline synthetase promoter (Herrar-Estrella et al., Nature 303:209-213 (1984)) or the cauliflower mosaic virus ³⁵S RNA promoter (Garder et al., Nucleic Acids Res. 9:2871 (1981)), and the promoter of the photosynthetic enzyme ribulose bisphosphate carboxylase (Herrera-Estrella et al., Nature 310:115-120 (1984)); promoter elements from yeast and other fungi such as the Gal4 promoter, the alcohol dehydrogenase promoter, the phosphoglycerol kinase promoter, the alkaline phosphatase promoter, and the following animal transcriptional control regions that exhibit tissue specificity and have been used in transgenic animals: elastase I gene control region which is active in pancreatic acinar cells (Swift et al., Cell 38:639-646 (1984); Ornitz et al., Cold Spring Harbor Symp. Quant. Biol. 50:399-409 (1986); MacDonald, Hepatology 7:425-515 (1987)); insulin gene control region which is active in pancreatic beta cells (Hanahan et al., Nature 315:115-122 (1985)), immunoglobulin gene control region which is active in lymphoid cells (Grosschedl et al., Cell 38:647-658 (1984); Adams et al., Nature 318:533-538 (1985); Alexander et al., Mol. Cell. Biol. 7:1436-1444 (1987)), mouse mammary tumor virus control region which is active in testicular, breast, lymphoid and mast cells (Leder et al., Cell 45:485-495 (1986)), albumin gene control region which is active in liver (Pinckert et al., Genes and Devel. 1:268-276 (1987)), alpha-fetoprotein gene control region which is active in liver (Krumlauf et al., Mol. Cell. Biol. 5:1639-1648 (1985); Hammer et al., Science 235:53-58 1987)), alpha-1 antitrypsin gene control region which is active in liver (Kelsey et al., Genes and Devel. 1:161-171 (1987)), beta globin gene control region which is active in myeloid cells (Mogram et al., Nature 315:338-340 (1985); Kollias et al., Cell 46:89-94 (1986)), myelin basic protein gene control region which is active in oligodendrocyte cells of the brain (Readhead et al., Cell 48:703-712 (1987)), myosin light chain-2 gene control region which is active in skeletal muscle (Sani, Nature 314:283-286 (1985)), and gonadotrophic releasing hormone gene control region which is active in gonadotrophs of the hypothalamus (Mason et al., Science 234:1372-1378 (1986)).

[0461] In a specific embodiment, a vector is used that contains a promoter operably linked to nucleic acids encoding a desired protein, or a domain, fragment, derivative or homolog, thereof, one or more origins of replication, and optionally, one or more selectable markers (e.g., an antibiotic resistance gene). For example, vectors and systems for expression of the protease domains of the protease proteins include the well known Pichia vectors (available, for example, from Invitrogen, San Diego, Calif.), particularly those designed for secretion of the encoded proteins. Exemplary plasmid vectors for transformation of E. coli cells, include, for example, the pQE expression vectors (available from Qiagen, Valencia, Calif.; see also literature published by Qiagen describing the system). pQE vectors have a phage T5 promoter (recognized by E. coli RNA polymerase) and a double lac operator repression module to provide tightly regulated, high-level expression of recombinant proteins in E. coli, a synthetic ribosomal binding site (RBS II) for efficient translation, a 6×His tag coding sequence, t₀ and T1 transcriptional terminators, ColE1 origin of replication, and a beta-lactamase gene for conferring ampicillin resistance. The pQE vectors enable placement of a 6×His tag at either the N- or C-terminus of the recombinant protein. Such plasmids include pQE 32, pQE 30, and pQE 31 which provide multiple cloning sites for all three reading frames and provide for the expression of N-terminally 6×His-tagged proteins. Other exemplary plasmid vectors for transformation of E. coli cells, include, for example, the pET expression vectors (see, U.S. Pat. No. 4,952,496; available from NOVAGEN, Madison, Wis.; see, also literature published by Novagen describing the system). Such plasmids include pET 11a, which contains the T7lac promoter, T7 terminator, the inducible E. coli lac operator, and the lac repressor gene; pET 12a-c, which contains the T7 promoter, T7 terminator, and the E. coli ompT secretion signal; and pET 15b and pET19b (NOVAGEN, Madison, Wis.), which contain a His-Tag™ leader sequence for use in purification with a His column and a thrombin cleavage site that permits cleavage following purification over the column, the T7-lac promoter region and the T7 terminator.

### 2. Expression

[0462] Proteins, such as any set forth herein including any protease trap polypeptides or variants thereof, or selected proteases or catalytically active portions thereof, can be produced by any method known to those of skill in the art including in vivo and in vitro methods. Desired proteins can be expressed in any organism suitable to produce the required amounts and forms of the proteins, such as for example, needed for administration and treatment. Expression hosts include prokaryotic and eukaryotic organisms such as E. coli, yeast, plants, insect cells, mammalian cells, including human cell lines and transgenic animals. Expression hosts can differ in their protein production levels as well as the types of post-translational modifications that are present on the expressed proteins. The choice of expression host can be made based on these and other factors, such as regulatory and safety considerations, production costs and the need and methods for purification.

[0463] Many expression vectors are available and known to those of skill in the art and can be used for expression of proteins. The choice of expression vector will be influenced by the choice of host expression system. In general, expression vectors can include transcriptional promoters and optionally enhancers, translational signals, and transcriptional and translational termination signals. Expression vectors that are used for stable transformation typically have a selectable marker which allows selection and maintenance of the transformed cells. In some cases, an origin of replication can be used to amplify the copy number of the vector.

[0464] Proteins, such as for example any variant protease provided herein or any protease trap polypeptide or variant thereof, also can be utilized or expressed as protein fusions. For example, a protease fusion can be generated to add additional functionality to a protease. Examples of protease fusion proteins include, but are not limited to, fusions of a signal sequence, a tag such as for localization, e.g. a his₆ tag or a myc tag, or a tag for purification, for example, a GST fusion, and a sequence for directing protein secretion and/or membrane association.

[0465] In one embodiment, a protease can be expressed in an active form. In another embodiment, a protease is expressed in an inactive, zymogen form.

[0466] a. Prokaryotic Cells

[0467] Prokaryotes, especially E. coli, provide a system for producing large amounts of proteins. Transformation of E. coli is simple and rapid technique well known to those of skill in the art. Expression vectors for E. coli can contain inducible promoters, such promoters are useful for inducing high levels of protein expression and for expressing proteins that exhibit some toxicity to the host cells. Examples of inducible promoters include the lac promoter, the trp promoter, the hybrid tac promoter, the T7 and SP6 RNA promoters and the temperature regulated λPL promoter.

[0468] Proteins, such as any provided herein, can be expressed in the cytoplasmic environment of E. coli. The cytoplasm is a reducing environment and for some molecules, this can result in the formation of insoluble inclusion bodies. Reducing agents such as dithiothreotol and β-mercaptoethanol and denaturants, such as guanidine-HCl and urea can be used to resolubilize the proteins. An alternative approach is the expression of proteins in the periplasmic space of bacteria which provides an oxidizing environment and chaperonin-like and disulfide isomerases and can lead to the production of soluble protein. Typically, a leader sequence is fused to the protein to be expressed which directs the protein to the periplasm. The leader is then removed by signal peptidases inside the periplasm. Examples of periplasmic-targeting leader sequences include the pelB leader from the pectate lyase gene and the leader derived from the alkaline phosphatase gene. In some cases, periplasmic expression allows leakage of the expressed protein into the culture medium. The secretion of proteins allows quick and simple purification from the culture supernatant. Proteins that are not secreted can be obtained from the periplasm by osmotic lysis. Similar to cytoplasmic expression, in some cases proteins can become insoluble and denaturants and reducing agents can be used to facilitate solubilization and refolding. Temperature of induction and growth also can influence expression levels and solubility, typically temperatures between 25° C. and 37° C. are used. Typically, bacteria produce aglycosylated proteins. Thus, if proteins require glycosylation for function, glycosylation can be added in vitro after purification from host cells.

[0469] b. Yeast Cells

[0470] Yeasts such as Saccharomyces cerevisae, Schizosaccharomyces pombe, Yarrowia lipolytica, Kluyveromyces lactis and Pichia pastoris are well known yeast expression hosts that can be used for production of proteins, such as any described herein. Yeast can be transformed with episomal replicating vectors or by stable chromosomal integration by homologous recombination. Typically, inducible promoters are used to regulate gene expression. Examples of such promoters include GAL1, GAL7 and GAL5 and metallothionein promoters, such as CUP1, AOX1 or other Pichia or other yeast promoter. Expression vectors often include a selectable marker such as LEU2, TRP1, HIS3 and URA3 for selection and maintenance of the transformed DNA. Proteins expressed in yeast are often soluble. Co-expression with chaperonins such as Bip and protein disulfide isomerase can improve expression levels and solubility. Additionally, proteins expressed in yeast can be directed for secretion using secretion signal peptide fusions such as the yeast mating type alpha-factor secretion signal from Saccharomyces cerevisae and fusions with yeast cell surface proteins such as the Aga2p mating adhesion receptor or the Arxula adeninivorans glucoamylase. A protease cleavage site such as for the Kex-2 protease, can be engineered to remove the fused sequences from the expressed polypeptides as they exit the secretion pathway. Yeast also is capable of glycosylation at Asn-X-Ser/Thr motifs.

[0471] c. Insect Cells

[0472] Insect cells, particularly using baculovirus expression, are useful for expressing polypeptides such as modified proteases or modified protease trap polypeptides. Insect cells express high levels of protein and are capable of most of the post-translational modifications used by higher eukaryotes. Baculovirus have a restrictive host range which improves the safety and reduces regulatory concerns of eukaryotic expression. Typical expression vectors use a promoter for high level expression such as the polyhedrin promoter of baculovirus. Commonly used baculovirus systems include the baculoviruses such as Autographa californica nuclear polyhedrosis virus (AcNPV), and the bombyx mori nuclear polyhedrosis virus (BmNPV) and an insect cell line such as Sf9 derived from Spodoptera frugiperda, Pseudaletia unipuncta (A7S) and Danaus plexippus (DpN1). For high-level expression, the nucleotide sequence of the molecule to be expressed is fused immediately downstream of the polyhedrin initiation codon of the virus. Mammalian secretion signals are accurately processed in insect cells and can be used to secrete the expressed protein into the culture medium. In addition, the cell lines Pseudaletia unipuncta (A7S) and Danaus plexippus (DpN1) produce proteins with glycosylation patterns similar to mammalian cell systems.

[0473] An alternative expression system in insect cells is the use of stably transformed cells. Cell lines such as the Schnieder 2 (S2) and Kc cells (Drosophila melanogaster) and C7 cells (Aedes albopictus) can be used for expression. The Drosophila metallothionein promoter can be used to induce high levels of expression in the presence of heavy metal induction with cadmium or copper. Expression vectors are typically maintained by the use of selectable markers such as neomycin and hygromycin.

[0474] d. Mammalian Cells

[0475] Mammalian expression systems can be used to express proteins including modified proteases or catalytically active portions thereof, or protease trap polypeptides or variants thereof. Expression constructs can be transferred to mammalian cells by viral infection such as adenovirus or by direct DNA transfer such as liposomes, calcium phosphate, DEAE-dextran and by physical means such as electroporation and microinjection. Expression vectors for mammalian cells typically include an mRNA cap site, a TATA box, a translational initiation sequence (Kozak consensus sequence) and polyadenylation elements. Such vectors often include transcriptional promoter-enhancers for high-level expression, for example the SV40 promoter-enhancer, the human cytomegalovirus (CMV) promoter and the long terminal repeat of Rous sarcoma virus (RSV). These promoter-enhancers are active in many cell types. Tissue and cell-type promoters and enhancer regions also can be used for expression. Exemplary promoter/enhancer regions include, but are not limited to, those from genes such as elastase I, insulin, immunoglobulin, mouse mammary tumor virus, albumin, alpha fetoprotein, alpha 1 antitrypsin, beta globin, myelin basic protein, myosin light chain 2, and gonadotropic releasing hormone gene control. Selectable markers can be used to select for and maintain cells with the expression construct. Examples of selectable marker genes include, but are not limited to, hygromycin B phosphotransferase, adenosine deaminase, xanthine-guanine phosphoribosyl transferase, aminoglycoside phosphotransferase, dihydrofolate reductase and thymidine kinase. Fusion with cell surface signaling molecules such as TCR-ζ and Fc_{ε}RI-γ can direct expression of the proteins in an active state on the cell surface.

[0476] Many cell lines are available for mammalian expression including mouse, rat human, monkey, chicken and hamster cells. Exemplary cell lines include but are not limited to CHO, Balb/3T3, HeLa, MT2, mouse NS0 (nonsecreting) and other myeloma cell lines, hybridoma and heterohybridoma cell lines, lymphocytes, fibroblasts, Sp2/0, COS, NIH3T3, HEK293, 293S, 2B8, and HKB cells. Cell lines also are available adapted to serum-free media which facilitates purification of secreted proteins from the cell culture media. One such example is the serum free EBNA-1 cell line (Pham et al., (2003) Biotechnol. Bioeng. 84:332-42.)

[0477] e. Plants

[0478] Transgenic plant cells and plants can be used to express proteins such as any described herein. Expression constructs are typically transferred to plants using direct DNA transfer such as microprojectile bombardment and PEG-mediated transfer into protoplasts, and with agrobacterium-mediated transformation. Expression vectors can include promoter and enhancer sequences, transcriptional termination elements and translational control elements. Expression vectors and transformation techniques are usually divided between dicot hosts, such as Arabidopsis and tobacco, and monocot hosts, such as corn and rice. Examples of plant promoters used for expression include the cauliflower mosaic virus promoter, the nopaline syntase promoter, the ribose bisphosphate carboxylase promoter and the ubiquitin and UBQ3 promoters. Selectable markers such as hygromycin, phosphomannose isomerase and neomycin phosphotransferase are often used to facilitate selection and maintenance of transformed cells. Transformed plant cells can be maintained in culture as cells, aggregates (callus tissue) or regenerated into whole plants. Transgenic plant cells also can include algae engineered to produce proteases or modified proteases (see for example, Mayfield et al. (2003) PNAS 100:438-442). Because plants have different glycosylation patterns than mammalian cells, this can influence the choice of protein produced in these hosts.

### 3. Purification Techniques

[0479] Method for purification of polypeptides, including protease polypeptides or other proteins, from host cells will depend on the chosen host cells and expression systems. For secreted molecules, proteins are generally purified from the culture media after removing the cells. For intracellular expression, cells can be lysed and the proteins purified from the extract. When transgenic organisms such as transgenic plants and animals are used for expression, tissues or organs can be used as starting material to make a lysed cell extract. Additionally, transgenic animal production can include the production of polypeptides in milk or eggs, which can be collected, and if necessary, the proteins can be extracted and further purified using standard methods in the art.

[0480] In one example, proteases can be expressed and purified to be in an inactive form (zymogen form) or alternatively the expressed protease can be purified into an active form, such as a two-chain form, by autocatalysis to remove the proregion. Typically, the autoactivation occurs during the purification process, such as by incubating at room temperature for 24-72 hours. The rate and degree of activation is dependent on protein concentration and the specific modified protease, such that for example, a more dilute sample can need to be incubated at room temperature for a longer period of time. Activation can be monitored by SDS-PAGE (e.g., a 3 kilodalton shift) and by enzyme activity (cleavage of a fluorogenic substrate). Typically, a protease is allowed to achieve >75% activation before purification.

[0481] Proteins, such as proteases or protease-trap polypeptides, can be purified using standard protein purification techniques known in the art including but not limited to, SDS-PAGE, size fraction and size exclusion chromatography, ammonium sulfate precipitation and ionic exchange chromatography, such as anion exchange. Affinity purification techniques also can be utilized to improve the efficiency and purity of the preparations. For example, antibodies, receptors and other molecules that bind proteases or protease trap polypeptides can be used in affinity purification. Expression constructs also can be engineered to add an affinity tag to a protein such as a myc epitope, GST fusion or His₆ and affinity purified with myc antibody, glutathione resin and Ni-resin, respectively. Purity can be assessed by any method known in the art including gel electrophoresis and staining and spectrophotometric techniques.

### 4. Fusion Proteins

[0482] Fusion proteins containing a variant protease provided herein and one or more other polypeptides also are provided. Pharmaceutical compositions containing such fusion proteins formulated for administration by a suitable route are provided. Fusion proteins are formed by linking in any order the modified protease and another polypeptide, such as an antibody or fragment thereof, growth factor, receptor, ligand and other such agent for the purposes of facilitating the purification of a protease, altering the pharmacodynamic properties of a protease by directing the protease to a targeted cell or tissue, and/or increasing the expression or secretion of a protease. Within a protease fusion protein, the protease polypeptide can correspond to all or a catalytically active portion thereof of a protease protein. In some embodiments, the protease or catalytically active portion thereof is a modified protease. Fusion proteins provided herein retain substantially all of their specificity and/or selectivity for any one or more of the desired target substrates. Generally, protease fusion polypeptides retain at least about 30%, 40%, 50%, 60%, 70%, 80%, 85%, 90% or 95% substrate specificity and/or selectivity compared with a non-fusion protease, including 96%, 97%, 98%, 99% or greater substrate specificity compared with a non-fusion protease.

[0483] Linkage of a protease polypeptide and another polypeptide can be effected directly or indirectly via a linker. In one example, linkage can be by chemical linkage, such as via heterobifunctional agents or thiol linkages or other such linkages. Fusion of a protease to another polypeptide can be to the N- or C-terminus of the protease polypeptide. Non-limiting examples of polypeptides that can be used in fusion proteins with a protease provided herein include, for example, a GST (glutathione S-transferase) polypeptide, Fc domain from an immunoglobulin, or a heterologous signal sequence. The fusion proteins can contain additional components, such as E. coli maltose binding protein (MBP) that aid in uptake of the protein by cells (see, International PCT application No. WO 01/32711).

[0484] A protease fusion protein can be produced by standard recombinant techniques. For example, DNA fragments coding for the different polypeptide sequences can be ligated together in-frame in accordance with conventional techniques, e.g., by employing blunt-ended or stagger-ended termini for ligation, restriction enzyme digestion to provide for appropriate termini, filling-in of cohesive ends as appropriate, alkaline phosphatase treatment to avoid undesirable joining, and enzymatic ligation. In another embodiment, the fusion gene can be synthesized by conventional techniques including automated DNA synthesizers. Alternatively, PCR amplification of gene fragments can be carried out using anchor primers that give rise to complementary overhangs between two consecutive gene fragments that can subsequently be annealed and reamplified to generate a chimeric gene sequence (see, e.g., Ausubel et al. (eds.) CURRENT PROTOCOLS IN MOLECULAR BIOLOGY, John Wiley & Sons, 1992). Moreover, many expression vectors are commercially available that already encode a fusion moiety (e.g., a GST polypeptide). A protease-encoding nucleic acid can be cloned into such an expression vector such that the fusion moiety is linked in-frame to the protease protein.

### 5. Nucleotide Sequences

[0485] Nucleic acid molecules encoding modified proteases are provided herein. Nucleic acid molecules include allelic variants or splice variants of any encoded protease, or catalytically active portion thereof. In one embodiment, nucleic acid molecules provided herein have at least 50, 60, 65, 70, 75, 80, 85, 90, 91, 92, 93, 94, 95, or 99% sequence identity or hybridize under conditions of medium or high stringency along at least 70% of a full-length of any nucleic acid encoded wild-type protease, or catalytically active portion thereof. In another embodiment, a nucleic acid molecule can include those with degenerate codon sequences of any of the proteases or catalytically active portions thereof such as those provided herein.

[0486] Nucleic acid molecules, or fusion proteins containing a catalytically active portion of a nucleic acid molecule, operably-linked to a promoter, such as an inducible promoter for expression in mammalian cells also are provided. Such promoters include, but are not limited to, CMV and SV40 promoters; adenovirus promoters, such as the E2 gene promoter, which is responsive to the HPV E7 oncoprotein; a PV promoter, such as the PBV p89 promoter that is responsive to the PV E2 protein; and other promoters that are activated by the HIV or PV or oncogenes.

[0487] Modified proteases provided herein, also can be delivered to the cells in gene transfer vectors. The transfer vectors also can encode additional other therapeutic agent(s) for treatment of the disease or disorder, such as coagulation disorders or cancer, for which the protease is administered. Transfer vectors encoding a protease can be used systemically, by administering the nucleic acid to a subject. For example, the transfer vector can be a viral vector, such as an adenovirus vector. Vectors encoding a protease also can be incorporated into stem cells and such stem cells administered to a subject such as by transplanting or engrafting the stem cells at sites for therapy. For example, mesenchymal stem cells (MSCs) can be engineered to express a protease and such MSCs engrafted at a tumor site for therapy.

### I. PREPARATION, FORMULATION AND ADMINISTRATION OF SELECTED PROTEASE POLYPEPTIDES

### 1. Compositions and Delivery

[0488] Compositions of selected proteases, such as for example selected mutant u-PA polypeptides, can be formulated for administration by any route known to those of skill in the art including intramuscular, intravenous, intradermal, intraperitoneal injection, subcutaneous, epidural, nasal, oral, rectal, topical, inhalational, buccal (e.g., sublingual), and transdermal administration or any route. Selected proteases can be administered by any convenient route, for example by infusion or bolus injection, by absorption through epithelial or mucocutaneous linings (e.g., oral mucosa, rectal and intestinal mucosa, etc.) and can be administered with other biologically active agents, either sequentially, intermittently or in the same composition. Administration can be local, topical or systemic depending upon the locus of treatment. Local administration to an area in need of treatment can be achieved by, for example, but not limited to, local infusion during surgery, topical application, e.g., in conjunction with a wound dressing after surgery, by injection, by means of a catheter, by means of a suppository, or by means of an implant. Administration also can include controlled release systems including controlled release formulations and device controlled release, such as by means of a pump. The most suitable route in any given case depends on a variety of factors, such as the nature of the disease, the progress of the disease, the severity of the disease the particular composition which is used.

[0489] Various delivery systems are known and can be used to administer selected proteases, such as but not limited to, encapsulation in liposomes, microparticles, microcapsules, recombinant cells capable of expressing the compound, receptor mediated endocytosis, and delivery of nucleic acid molecules encoding selected proteases such as retrovirus delivery systems.

[0490] Pharmaceutical compositions containing selected proteases can be prepared. Generally, pharmaceutically acceptable compositions are prepared in view of approvals for a regulatory agency or other agency prepared in accordance with generally recognized pharmacopeia for use in animals and in humans. Pharmaceutical compositions can include carriers such as a diluent, adjuvant, excipient, or vehicle with which an isoform is administered. Such pharmaceutical carriers can be sterile liquids, such as water and oils, including those of petroleum, animal, vegetable or synthetic origin, such as peanut oil, soybean oil, mineral oil, and sesame oil. Water is a typical carrier when the pharmaceutical composition is administered intravenously. Saline solutions and aqueous dextrose and glycerol solutions also can be employed as liquid carriers, particularly for injectable solutions. Compositions can contain along with an active ingredient: a diluent such as lactose, sucrose, dicalcium phosphate, or carboxymethylcellulose; a lubricant, such as magnesium stearate, calcium stearate and talc; and a binder such as starch, natural gums, such as gum acaciagelatin, glucose, molasses, polyinylpyrrolidine, celluloses and derivatives thereof, povidone, crospovidones and other such binders known to those of skill in the art. Suitable pharmaceutical excipients include starch, glucose, lactose, sucrose, gelatin, malt, rice, flour, chalk, silica gel, sodium stearate, glycerol monostearate, talc, sodium chloride, dried skim milk, glycerol, propylene, glycol, water, and ethanol. A composition, if desired, also can contain minor amounts of wetting or emulsifying agents, or pH buffering agents, for example, acetate, sodium citrate, cyclodextrine derivatives, sorbitan monolaurate, triethanolamine sodium acetate, triethanolamine oleate, and other such agents. These compositions can take the form of solutions, suspensions, emulsion, tablets, pills, capsules, powders, and sustained release formulations. A composition can be formulated as a suppository, with traditional binders and carriers such as triglycerides. Oral formulation can include standard carriers such as pharmaceutical grades of mannitol, lactose, starch, magnesium stearate, sodium saccharine, cellulose, magnesium carbonate, and other such agents. Examples of suitable pharmaceutical carriers are described in “Remington's Pharmaceutical Sciences” by E. W. Martin. Such compositions will contain a therapeutically effective amount of the compound, generally in purified form, together with a suitable amount of carrier so as to provide the form for proper administration to the patient. The formulation should suit the mode of administration.

[0491] Formulations are provided for administration to humans and animals in unit dosage forms, such as tablets, capsules, pills, powders, granules, sterile parenteral solutions or suspensions, and oral solutions or suspensions, and oil water emulsions containing suitable quantities of the compounds or pharmaceutically acceptable derivatives thereof. Pharmaceutically therapeutically active compounds and derivatives thereof are typically formulated and administered in unit dosage forms or multiple dosage forms. Each unit dose contains a predetermined quantity of therapeutically active compound sufficient to produce the desired therapeutic effect, in association with the required pharmaceutical carrier, vehicle or diluent. Examples of unit dose forms include ampoules and syringes and individually packaged tablets or capsules. Unit dose forms can be administered in fractions or multiples thereof. A multiple dose form is a plurality of identical unit dosage forms packaged in a single container to be administered in segregated unit dose form. Examples of multiple dose forms include vials, bottles of tablets or capsules or bottles of pints or gallons. Hence, multiple dose form is a multiple of unit doses that are not segregated in packaging.

[0492] Dosage forms or compositions containing active ingredient in the range of 0.005% to 100% with the balance made up from non-toxic carrier can be prepared. For oral administration, pharmaceutical compositions can take the form of, for example, tablets or capsules prepared by conventional means with pharmaceutically acceptable excipients such as binding agents (e.g., pregelatinized maize starch, polyvinyl pyrrolidone or hydroxypropyl methylcellulose); fillers (e.g., lactose, microcrystalline cellulose or calcium hydrogen phosphate); lubricants (e.g., magnesium stearate, talc or silica); disintegrants (e.g., potato starch or sodium starch glycolate); or wetting agents (e.g., sodium lauryl sulphate). The tablets can be coated by methods well-known in the art.

[0493] Pharmaceutical preparation also can be in liquid form, for example, solutions, syrups or suspensions, or can be presented as a drug product for reconstitution with water or other suitable vehicle before use. Such liquid preparations can be prepared by conventional means with pharmaceutically acceptable additives such as suspending agents (e.g., sorbitol syrup, cellulose derivatives or hydrogenated edible fats); emulsifying agents (e.g., lecithin or acacia); non-aqueous vehicles (e.g., almond oil, oily esters, or fractionated vegetable oils); and preservatives (e.g., methyl or propyl-p-hydroxybenzoates or sorbic acid).

[0494] Formulations suitable for rectal administration can be provided as unit dose suppositories. These can be prepared by admixing the active compound with one or more conventional solid carriers, for example, cocoa butter, and then shaping the resulting mixture.

[0495] Formulations suitable for topical application to the skin or to the eye include ointments, creams, lotions, pastes, gels, sprays, aerosols and oils. Exemplary carriers include vaseline, lanoline, polyethylene glycols, alcohols, and combinations of two or more thereof. The topical formulations also can contain 0.05 to 15, 20, 25 percent by weight of thickeners selected from among hydroxypropyl methyl cellulose, methyl cellulose, polyvinylpyrrolidone, polyvinyl alcohol, poly(alkylene glycols), poly/hydroxyalkyl, (meth)acrylates or poly(meth)acrylamides. A topical formulation is often applied by instillation or as an ointment into the conjunctival sac. It also can be used for irrigation or lubrication of the eye, facial sinuses, and external auditory meatus. It also can be injected into the anterior eye chamber and other places. A topical formulation in the liquid state also can be present in a hydrophilic three-dimensional polymer matrix in the form of a strip or contact lens, from which the active components are released.

[0496] For administration by inhalation, the compounds for use herein can be delivered in the form of an aerosol spray presentation from pressurized packs or a nebulizer, with the use of a suitable propellant, e.g., dichlorodifluoromethane, trichlorofluoromethane, dichlorotetrafluoroethane, carbon dioxide or other suitable gas. In the case of a pressurized aerosol, the dosage unit can be determined by providing a valve to deliver a metered amount. Capsules and cartridges of, e.g., gelatin, for use in an inhaler or insufflator can be formulated containing a powder mix of the compound and a suitable powder base such as lactose or starch.

[0497] Formulations suitable for buccal (sublingual) administration include, for example, lozenges containing the active compound in a flavored base, usually sucrose and acacia or tragacanth; and pastilles containing the compound in an inert base such as gelatin and glycerin or sucrose and acacia.

[0498] Pharmaceutical compositions of selected proteases can be formulated for parenteral administration by injection, e.g., by bolus injection or continuous infusion. Formulations for injection can be presented in unit dosage form, e.g., in ampules or in multi-dose containers, with an added preservative. The compositions can be suspensions, solutions or emulsions in oily or aqueous vehicles, and can contain formulatory agents such as suspending, stabilizing and/or dispersing agents. Alternatively, the active ingredient can be in powder form for reconstitution with a suitable vehicle, e.g., sterile pyrogen-free water or other solvents, before use.

[0499] Formulations suitable for transdermal administration are provided. They can be provided in any suitable format, such as discrete patches adapted to remain in intimate contact with the epidermis of the recipient for a prolonged period of time. Such patches contain the active compound in optionally buffered aqueous solution of, for example, 0.1 to 0.2M concentration with respect to the active compound. Formulations suitable for transdermal administration also can be delivered by iontophoresis (see, e.g., Pharmaceutical Research 3(6), 318 (1986)) and typically take the form of an optionally buffered aqueous solution of the active compound.

[0500] Pharmaceutical compositions also can be administered by controlled release formulations and/or delivery devices (see, e.g., in U.S. Pat. Nos. 3,536,809; 3,598,123; 3,630,200; 3,845,770; 3,847,770; 3,916,899; 4,008,719; 4,687,610; 4,769,027; 5,059,595; 5,073,543; 5,120,548; 5,354,566; 5,591,767; 5,639,476; 5,674,533 and 5,733,566).

[0501] In certain embodiments, liposomes and/or nanoparticles also can be employed with selected protease administration. Liposomes are formed from phospholipids that are dispersed in an aqueous medium and spontaneously form multilamellar concentric bilayer vesicles (also termed multilamellar vesicles (MLVs)). MLVs generally have diameters of from 25 nm to 4 μm. Sonication of MLVs results in the formation of small unilamellar vesicles (SUVs) with diameters in the range of 200 to 500 angstroms containing an aqueous solution in the core.

[0502] Phospholipids can form a variety of structures other than liposomes when dispersed in water, depending on the molar ratio of lipid to water. At low ratios, the liposomes form. Physical characteristics of liposomes depend on pH, ionic strength and the presence of divalent cations. Liposomes can show low permeability to ionic and polar substances, but at elevated temperatures undergo a phase transition which markedly alters their permeability. The phase transition involves a change from a closely packed, ordered structure, known as the gel state, to a loosely packed, less-ordered structure, known as the fluid state. This occurs at a characteristic phase-transition temperature and results in an increase in permeability to ions, sugars and drugs.

[0503] Liposomes interact with cells via different mechanisms: endocytosis by phagocytic cells of the reticuloendothelial system such as macrophages and neutrophils; adsorption to the cell surface, either by nonspecific weak hydrophobic or electrostatic forces, or by specific interactions with cell-surface components; fusion with the plasma cell membrane by insertion of the lipid bilayer of the liposome into the plasma membrane, with simultaneous release of liposomal contents into the cytoplasm; and by transfer of liposomal lipids to cellular or subcellular membranes, or vice versa, without any association of the liposome contents. Varying the liposome formulation can alter which mechanism is operative, although more than one can operate at the same time. Nanocapsules can generally entrap compounds in a stable and reproducible way. To avoid side effects due to intracellular polymeric overloading, such ultrafine particles (sized around 0.1 μm) should be designed using polymers able to be degraded in vivo. Biodegradable polyalkyl-cyanoacrylate nanoparticles that meet these requirements are contemplated for use herein, and such particles can be easily made.

[0504] Administration methods can be employed to decrease the exposure of selected proteases to degradative processes, such as proteolytic degradation and immunological intervention via antigenic and immunogenic responses. Examples of such methods include local administration at the site of treatment. Pegylation of therapeutics has been reported to increase resistance to proteolysis, increase plasma half-life, and decrease antigenicity and immunogenicity. Examples of pegylation methodologies are known in the art (see for example, Lu and Felix, Int. J. Peptide Protein Res., 43: 127-138, 1994; Lu and Felix, Peptide Res., 6: 142-6, 1993; Felix et al., Int. J. Peptide Res., 46: 253-64, 1995; Benhar et al., J. Biol. Chem., 269: 13398-404, 1994; Brumeanu et al., J Immunol., 154: 3088-95, 1995; see also, Caliceti et al. (2003) Adv. Drug Deliv. Rev. 55(10):1261-77 and Molineux (2003) Pharmacotherapy 23 (8 Pt 2):3S-8S). Pegylation also can be used in the delivery of nucleic acid molecules in vivo. For example, pegylation of adenovirus can increase stability and gene transfer (see, e.g., Cheng et al. (2003) Pharm. Res. 20(9): 1444-51).

[0505] Desirable blood levels can be maintained by a continuous infusion of the active agent as ascertained by plasma levels. It should be noted that the attending physician would know how to and when to terminate, interrupt or adjust therapy to lower dosage due to toxicity, or bone marrow, liver or kidney dysfunctions. Conversely, the attending physician would also know how to and when to adjust treatment to higher levels if the clinical response is not adequate (precluding toxic side effects).

[0506] Pharmaceutical compositions can be administered, for example, by oral, pulmonary, parental (intramuscular, intraperitoneal, intravenous (IV) or subcutaneous injection), inhalation (via a fine powder formulation), transdermal, nasal, vaginal, rectal, or sublingual routes of administration and can be formulated in dosage forms appropriate for each route of administration (see, e.g., International PCT application Nos. WO 93/25221 and WO 94/17784; and European Patent Application 613,683).

[0507] A selected protease is included in the pharmaceutically acceptable carrier in an amount sufficient to exert a therapeutically useful effect in the absence of undesirable side effects on the patient treated. Therapeutically effective concentration can be determined empirically by testing the compounds in known in vitro and in vivo systems, such as the assays provided herein.

[0508] The concentration of a selected protease in the composition depends on absorption, inactivation and excretion rates of the complex, the physicochemical characteristics of the complex, the dosage schedule, and amount administered as well as other factors known to those of skill in the art. The amount of a selected protease to be administered for the treatment of a disease or condition, for example cancer or angiogenesis treatment can be determined by standard clinical techniques. In addition, in vitro assays and animal models can be employed to help identify optimal dosage ranges. The precise dosage, which can be determined empirically, can depend on the route of administration and the seriousness of the disease.

[0509] A selected protease can be administered at once, or can be divided into a number of smaller doses to be administered at intervals of time. Selected proteases can be administered in one or more doses over the course of a treatment time for example over several hours, days, weeks, or months. In some cases, continuous administration is useful. It is understood that the precise dosage and duration of treatment is a function of the disease being treated and can be determined empirically using known testing protocols or by extrapolation from in vivo or in vitro test data. It is to be noted that concentrations and dosage values also can vary with the severity of the condition to be alleviated. It is to be further understood that for any particular subject, specific dosage regimens should be adjusted over time according to the individual need and the professional judgment of the person administering or supervising the administration of the compositions, and that the concentration ranges set forth herein are exemplary only and are not intended to limit the scope or use of compositions and combinations containing them. The compositions can be administered hourly, daily, weekly, monthly, yearly or once. The mode of administration of the composition containing the polypeptides as well as compositions containing nucleic acids for gene therapy, includes, but is not limited to intralesional, intraperitoneal, intramuscular and intravenous administration. Also included are infusion, intrathecal, subcutaneous, liposome-mediated, depot-mediated administration. Also included, are nasal, ocular, oral, topical, local and otic delivery. Dosages can be empirically determined and depend upon the indication, mode of administration and the subject. Exemplary dosages include from 0.1, 1, 10, 100, 200 and more mg/day/kg weight of the subject.

### 2. In vivo Expression of Selected Proteases and Gene Therapy

[0510] Selected proteases can be delivered to cells and tissues by expression of nucleic acid molecules. Selected proteases can be administered as nucleic acid molecules encoding a selected protease, including ex vivo techniques and direct in vivo expression.

[0511] a. Delivery of Nucleic Acids

[0512] Nucleic acids can be delivered to cells and tissues by any method known to those of skill in the art.

[0513] i. Vectors—Episomal and Integrating

[0514] Methods for administering selected proteases by expression of encoding nucleic acid molecules include administration of recombinant vectors. The vector can be designed to remain episomal, such as by inclusion of an origin of replication or can be designed to integrate into a chromosome in the cell. Recombinant vectors can include viral vectors and non-viral vectors. Non-limiting viral vectors include, for example, adenoviral vector, herpes virus vectors, retroviral vectors, and any other viral vector known to one of skill in the art. Non-limiting non-viral vectors include artificial chromosomes or liposomes or other non-viral vector. Selected proteases also can be used in ex vivo gene expression therapy using viral and non-viral vectors. For example, cells can be engineered to express a selected protease, such as by integrating a selected protease encoding-nucleic acid into a genomic location, either operatively linked to regulatory sequences or such that it is placed operatively linked to regulatory sequences in a genomic location. Such cells then can be administered locally or systemically to a subject, such as a patient in need of treatment.

[0515] A selected protease can be expressed by a virus, which is administered to a subject in need of treatment. Virus vectors suitable for gene therapy include adenovirus, adeno-associated virus, retroviruses, lentiviruses and others noted above. For example, adenovirus expression technology is well-known in the art and adenovirus production and administration methods also are well known. Adenovirus serotypes are available, for example, from the American Type Culture Collection (ATCC, Rockville, Md.). Adenovirus can be used ex vivo, for example, cells are isolated from a patient in need of treatment, and transduced with a selected protease-expressing adenovirus vector. After a suitable culturing period, the transduced cells are administered to a subject, locally and/or systemically. Alternatively, selected protease-expressing adenovirus particles are isolated and formulated in a pharmaceutically-acceptable carrier for delivery of a therapeutically effective amount to prevent, treat or ameliorate a disease or condition of a subject. Typically, adenovirus particles are delivered at a dose ranging from 1 particle to 1014 particles per kilogram subject weight, generally between 106 or 108 particles to 1012 particles per kilogram subject weight. In some situations it is desirable to provide a nucleic acid source with an agent that targets cells, such as an antibody specific for a cell surface membrane protein or a target cell, or a ligand for a receptor on a target cell.

[0516] ii. Artificial Chromosomes and Other Non-Viral Vector Delivery Methods

[0517] The nucleic acid molecules can be introduced into artificial chromosomes and other non-viral vectors. Artificial chromosomes (see, e.g., U.S. Pat. No. 6,077,697 and PCT International PCT application No. WO 02/097059) can be engineered to encode and express the isoform.

[0518] iii. Liposomes and Other Encapsulated Forms and Administration of Cells Containing Nucleic Acids

[0519] The nucleic acids can be encapsulated in a vehicle, such as a liposome, or introduced into cells, such as a bacterial cell, particularly an attenuated bacterium or introduced into a viral vector. For example, when liposomes are employed, proteins that bind to a cell surface membrane protein associated with endocytosis can be used for targeting and/or to facilitate uptake, e.g. capsid proteins or fragments thereof tropic for a particular cell type, antibodies for proteins which undergo internalization in cycling, and proteins that target intracellular localization and enhance intracellular half-life.

[0520] b. In Vitro and Ex vivo Delivery

[0521] For ex vivo and in vivo methods, nucleic acid molecules encoding the selected protease is introduced into cells that are from a suitable donor or the subject to be treated. Cells into which a nucleic acid can be introduced for purposes of therapy include, for example, any desired, available cell type appropriate for the disease or condition to be treated, including but not limited to epithelial cells, endothelial cells, keratinocytes, fibroblasts, muscle cells, hepatocytes; blood cells such as T lymphocytes, B lymphocytes, monocytes, macrophages, neutrophils, eosinophils, megakaryocytes, granulocytes; various stem or progenitor cells, in particular hematopoietic stem or progenitor cells, e.g., such as stem cells obtained from bone marrow, umbilical cord blood, peripheral blood, fetal liver, and other sources thereof.

[0522] For ex vivo treatment, cells from a donor compatible with the subject to be treated, or cells from the subject to be treated, are removed, the nucleic acid is introduced into these isolated cells and the modified cells are administered to the subject. Treatment includes direct administration, such as or, for example, encapsulated within porous membranes, which are implanted into the patient (see, e.g. U.S. Pat. Nos. 4,892,538 and 5,283,187). Techniques suitable for the transfer of nucleic acid into mammalian cells in vitro include the use of liposomes and cationic lipids (e.g., DOTMA, DOPE and DC-Chol) electroporation, microinjection, cell fusion, DEAE-dextran, and calcium phosphate precipitation methods. Methods of DNA delivery can be used to express selected proteases in vivo. Such methods include liposome delivery of nucleic acids and naked DNA delivery, including local and systemic delivery such as using electroporation, ultrasound and calcium-phosphate delivery. Other techniques include microinjection, cell fusion, chromosome-mediated gene transfer, microcell-mediated gene transfer and spheroplast fusion.

[0523] In vivo expression of a selected protease can be linked to expression of additional molecules. For example, expression of a selected protease can be linked with expression of a cytotoxic product such as in an engineered virus or expressed in a cytotoxic virus. Such viruses can be targeted to a particular cell type that is a target for a therapeutic effect. The expressed selected protease can be used to enhance the cytotoxicity of the virus.

[0524] In vivo expression of a selected protease can include operatively linking a selected protease encoding nucleic acid molecule to specific regulatory sequences such as a cell-specific or tissue-specific promoter. Selected proteases also can be expressed from vectors that specifically infect and/or replicate in target cell types and/or tissues. Inducible promoters can be used to selectively regulate selected protease expression.

[0525] c. Systemic, Local and Topical Delivery

[0526] Nucleic acid molecules, as naked nucleic acids or in vectors, artificial chromosomes, liposomes and other vehicles can be administered to the subject by systemic administration, topical, local and other routes of administration. When systemic and in vivo, the nucleic acid molecule or vehicle containing the nucleic acid molecule can be targeted to a cell.

[0527] Administration also can be direct, such as by administration of a vector or cells that typically targets a cell or tissue. For example, tumor cells and proliferating cells can be targeted cells for in vivo expression of selected proteases. Cells used for in vivo expression of an isoform also include cells autologous to the patient. Such cells can be removed from a patient, nucleic acids for expression of a selected protease introduced, and then administered to a patient such as by injection or engraftment.

### 2. Combination Therapies

[0528] Any of the selected protease polypeptides, and nucleic acid molecules encoding selected protease polypeptides described herein can be administered in combination with, prior to, intermittently with, or subsequent to, other therapeutic agents or procedures including, but not limited to, other biologics, small molecule compounds and surgery. For any disease or condition, including all those exemplified above, for which other agents and treatments are available, selected protease polypeptides for such diseases and conditions can be used in combination therewith. For example, selected protease polypeptides provided herein for the treatment of a proliferative disease for example, cancer, can be administered in combination with, prior to, intermittently with, or subsequent to, other anti-cancer therapeutic agents, for example chemotherapeutic agents, radionuclides, radiation therapy, cytokines, growth factors, photosensitizing agents, toxins, anti-metabolites, signaling modulators, anti-cancer antibiotics, anti-cancer antibodies, angiogenesis inhibitors, or a combination thereof. In a specific example, selected protease polypeptides provided herein for the treatment of thrombotic diseases can be administered in combination with, prior to, intermittently with, or subsequent to, other anticoagulant agents including, but not limited to, platelet inhibitors, vasodilators, fibrolytic activators, or other anticoagulants. Exemplary anticoagulants include heparin, coumarin, hirudin, aspirin, naproxen, meclofenamic acid, ibuprofen, indomethacin, phenylbutazare, ticlopidine, streptokinase, urokinase, and tissue plasminogen activator.

### 3. Articles of Manufacture and Kits

[0529] Pharmaceutical compounds of selected protease polypeptides for nucleic acids encoding selected protease polypeptides, or a derivative or a biologically active portion thereof can be packaged as articles of manufacture containing packaging material, a pharmaceutical composition which is effective for treating the disease or disorder, and a label that indicates that selected protease polypeptide or nucleic acid molecule is to be used for treating the disease or disorder.

[0530] The articles of manufacture provided herein contain packaging materials. Packaging materials for use in packaging pharmaceutical products are well known to those of skill in the art. See, for example, U.S. Pat. Nos. 5,323,907, 5,052,558 and 5,033,252, each of which is incorporated herein in its entirety. Examples of pharmaceutical packaging materials include, but are not limited to, blister packs, bottles, tubes, inhalers, pumps, bags, vials, containers, syringes, bottles, and any packaging material suitable for a selected formulation and intended mode of administration and treatment. A wide array of formulations of the compounds and compositions provided herein are contemplated as are a variety of treatments for any target-mediated disease or disorder.

[0531] Selected protease polypeptides and nucleic acid molecules also can be provided as kits. Kits can include a pharmaceutical composition described herein and an item for administration. For example a selected protease can be supplied with a device for administration, such as a syringe, an inhaler, a dosage cup, a dropper, or an applicator. The kit can, optionally, include instructions for application including dosages, dosing regimens and instructions for modes of administration. Kits also can include a pharmaceutical composition described herein and an item for diagnosis. For example, such kits can include an item for measuring the concentration, amount or activity of the selected protease in a subject.

### J. EXEMPLARY METHODS OF TREATMENT WITH SELECTED PROTEASE POLYPEPTIDES

[0532] The selected protease polypeptides provided herein that cleave particular targets and nucleic acid molecules that encode the selected proteases provided herein can be used for treatment of any disease or condition associated with a protein containing the target sequence or for which a protease that cleaves the target sequence is employed. For example, selected uPA polypeptides engineered to cleave tPA target substrates, such as plasminogen, can be used for treatment of any disease or condition associated with the tPA target substrate or for which tPA polypeptides are employed. Exemplary diseases associated with a tPA target substrate include thrombolytic diseases where treatment with a selected protease provided herein can promote cleavage of plasminogen to its active protease form plasmin, and induce dissolution of a blot clot.

[0533] Selected protease polypeptides have therapeutic activity alone or in combination with other agents. The selected protease polypeptides provided herein are designed to exhibit improved properties over competing binding proteins. Such properties, for example, can improve the therapeutic effectiveness of the polypeptides. This section provides exemplary uses of and administration methods. These described therapies are exemplary and do not limit the applications of selected protease polypeptides.

[0534] The selected protease polypeptides provided herein can be used in various therapeutic as well as diagnostic methods that are associated with a protein containing the target sequence. Such methods include, but are not limited to, methods of treatment of physiological and medical conditions described and listed below. Selected protease polypeptides provided herein can exhibit improvement of in vivo activities and therapeutic effects compared to competing binding proteins or a protease that cleaves the particular target, including lower dosage to achieve the same effect, a more sustained therapeutic effect and other improvements in administration and treatment. Examples of therapeutic improvements using selected protease polypeptides include, but are not limited to, better target tissue penetration (e.g. tumor penetration), higher effectiveness, lower dosages, fewer and/or less frequent administrations, decreased side effects and increased therapeutic effects. Notably, because the selected proteases can cleave and inactivate high numbers of the target substrate, the selected proteases offer substantial therapeutic amplification.

[0535] In particular, selected protease polypeptides, are intended for use in therapeutic methods in which a protease that cleaves the particular target has been used for treatment. Such methods include, but are not limited to, methods of treatment of diseases and disorders, such as, but not limited to, blood coagulation disorders, including thrombolytic disorders and disseminated intravascular coagulation, cardiovascular diseases, neurological disorders, proliferative diseases, such as cancer, inflammatory diseases, autoimmune diseases, viral infection, bacterial infection, respiratory diseases, gastrointestinal disorders, and metabolic diseases.

[0536] Treatment of diseases and conditions with selected protease polypeptides can be effected by any suitable route of administration using suitable formulations as described herein including, but not limited to, intramuscular, intravenous, intradermal, intraperitoneal injection, subcutaneous, epidural, nasal oral, rectal, topical, inhalational, buccal (e.g., sublingual), and transdermal administration. If necessary, a particular dosage and duration and treatment protocol can be empirically determined or extrapolated. For example, exemplary doses of wild-type protease polypeptides that cleave similar sequences can be used as a starting point to determine appropriate dosages. For example, a dosage of a recombinant tPA polypeptide can be used as a guideline for determining dosages of selected uPA polypeptides that cleave tPA targets.

[0537] Dosage levels and regimens can be determined based upon known dosages and regimens, and, if necessary can be extrapolated based upon the changes in properties of the selected protease polypeptides and/or can be determined empirically based on a variety of factors. Factors such as the level of activity and half-life of the selected protease polypeptides in comparison to other similar proteases can be used in making such determinations. Particular dosages and regimens can be empirically determined. Other such factors include body weight of the individual, general health, age, the activity of the specific compound employed, sex, diet, time of administration, rate of excretion, drug combination, the severity and course of the disease, and the patient's disposition to the disease and the judgment of the treating physician. The active ingredient, the selected protease polypeptide, typically is combined with a pharmaceutically effective carrier. The amount of active ingredient that can be combined with the carrier materials to produce a single dosage form or multi-dosage form can vary depending upon the host treated and the particular mode of administration.

[0538] The effect of the selected protease polypeptides on the treatment of a disease or amelioration of symptoms of a disease can be monitored using any diagnostic test known in the art for the particular disease to be treated. Upon improvement of a patient's condition, a maintenance dose of a compound or compositions can be administered, if necessary; and the dosage, the dosage form, or frequency of administration, or a combination thereof can be modified. In some cases, a subject can require intermittent treatment on a long-term basis upon any recurrence of disease symptoms or based upon scheduled dosages. In other cases, additional administrations can be required in response to acute events such as hemorrhage, trauma, or surgical procedures.

[0539] In some examples, variants of the selected protease proteins that function as either protease agonists (i.e., mimetics) or as protease antagonists are employed. Variants of the selected protease polypeptide can be generated by mutagenesis (e.g., discrete point mutation or truncation of the protease protein). An agonist of the selected protease polypeptide can retain substantially the same, or a subset of, the biological activities of the naturally occurring form of the selected protease polypeptide. An antagonist of the selected protease polypeptide can inhibit one or more of the activities of the naturally occurring form of the selected protease polypeptide by, for example, cleaving the same target protein as the selected protease polypeptide. Thus, specific biological effects can be elicited by treatment with a variant of limited function. In one embodiment, treatment of a subject with a variant having a subset of the biological activities of the naturally occurring form of the selected protease polypeptide has fewer side effects in a subject relative to treatment with the naturally occurring form of the selected protease polypeptide.

[0540] The following are some exemplary diseases or conditions for which selected proteases can be used as a treatment agent alone or in combination with other agents. Exemplary targets for selection of proteases are for illustrative purposes and not intended to limit the scope of possible targets for use in the methods provided herein.

### 1. Exemplary Methods of Treatment for Selected uPA Polypeptides that Cleave tPA Targets

[0541] Selected uPA polypeptides that cleave tPA target sequences are useful in therapeutic applications for use in ameliorating thrombotic disorders including both acute and chronic conditions. Acute conditions include among others both heart attack and stroke while chronic situations include those of arterial and deep vein thrombosis and restenosis. The selected uPA polypeptides can be used as thrombolytic therapeutic agents for ameliorating the symptoms of such conditions. Therapeutic compositions include the polypeptides, cDNA molecules alone or part of a viral vector delivery system or other vector-based gene expression delivery system, presented in a liposome delivery system and the like. A composition for use as a thrombolytic therapeutic agent generally is a physiologically effective amount of the selected uPA polypeptides in a pharmaceutically suitable excipient. Depending on the mode of administration and the condition to be treated, the thrombolytic therapeutic agents are administered in single or multiple doses. One skilled in the art will appreciate that variations in dosage depend on the condition to be treated.

[0542] Selected uPA polypeptides provided herein that inhibit or antagonize blood coagulation can be used in anticoagulant methods of treatment for ischemic disorders, such as a peripheral vascular disorder, a pulmonary embolus, a venous thrombosis, deep vein thrombosis (DVT), superficial thrombophlebitis (SVT), arterial thrombosis, a myocardial infarction, a transient ischemic attack, unstable angina, a reversible ischemic neurological deficit, an adjunct thrombolytic activity, excessive clotting conditions, reperfusion injury, sickle cell anemia or stroke disorder. In patients with an increased risk of excessive clotting, such as DVT or SVT, during surgery, protease inactive selected uPA polypeptides provided herein can be administered to prevent excessive clotting in surgeries, such as, but not limited to heart surgery, angioplasty, lung surgery, abdominal surgery, spinal surgery, brain surgery, vascular surgery, or organ transplant surgery, including transplantation of heart, lung, pancreas, or liver. In some cases treatment is performed with selected uPA polypeptides alone. In some cases, selected uPA polypeptides are administered in conjunction with additional anticoagulation factors as required by the condition or disease to be treated.

[0543] tPA is the only therapy for acute thromboembolic stroke, which is approved by the Food and Drug Administration (FDA). tPA and variants thereof are commercially available and have been approved for administration to humans for a variety of conditions. For example alteplase (Activase®, Genentech, South San Francisco, Calif.) is recombinant human tPA. Reteplase (Retavase®, Rapilysin®; Boehringer Mannheim, Roche Centoror) is a recombinant non-glycosylated form of human tPA in which the molecule has been genetically engineered to contain 355 of the 527 amino acids of the original protein. Tenecteplase (TNKase®, Genentech) is a 527 amino acid glycoprotein derivative of human tPA that differs from naturally occurring human tPA by having three amino acid substitutions. These substitutions decrease plasma clearance, increase fibrin binding (and thereby increase fibrin specificity), and increase resistance to plasminogen activator inhibitor-1 (PAI-1). Anistreplase (Eminase®, SmithKline Beecham) is yet another commercially available human tPA. Selected uPA polypeptides provided herein with specificity toward tPA targets can be similarly modified and prescribed for any therapy that is treatable with tPA.

[0544] a. Thrombotic Diseases and Conditions

[0545] Thrombotic diseases are characterized by hypercoagulation, or the deregulation of hemostasis in favor of development of blot clots. Exemplary thrombotic diseases and conditions include arterial thrombosis, venous thrombosis, venous thromboembolism, pulmonary embolism, deep vein thrombosis, stroke, ischemic stroke, myocardial infarction, unstable angina, atrial fibrillation, renal damage, percutaneous transluminal coronary angioplasty, disseminated intravascular coagulation, sepsis, artificial organs, shunts or prostheses, and other acquired thrombotic diseases, as discussed below. Typical therapies for thrombotic diseases involve anticoagulant therapies, including inhibition of the coagulation cascade.

[0546] The selected uPA polypeptides provided herein and the nucleic acids encoding the selected uPA polypeptides provided herein can be used in anticoagulant therapies for thrombotic diseases and conditions, including treatment of conditions involving intravascular coagulation. The selected uPA polypeptides provided herein the can inhibit blood coagulation can be used, for example, to control, dissolve, or prevent formation of thromboses. In a particular embodiment, the selected uPA polypeptides herein, and nucleic acids encoding selected uPA polypeptides can be used for treatment of an arterial thrombotic disorder. In another embodiment, the selected uPA polypeptides herein, and nucleic acids encoding modified selected uPA polypeptides can be used for treatment of a venous thrombotic disorder, such as deep vein thrombosis. In a particular embodiment, the selected uPA polypeptides herein, and nucleic acids encoding selected uPA polypeptides can be used for treatment of an ischemic disorder, such as stroke. Examples of therapeutic improvements using selected uPA polypeptides include for example, but are not limited to, lower dosages, fewer and/or less frequent administrations, decreased side effects, and increased therapeutic effects. Selected uPA polypeptides can be tested for therapeutic effectiveness, for example, by using animal models. For example mouse models of ischemic stroke, or any other known disease model for a thrombotic disease or condition, can be treated with selected uPA polypeptides (Dodds, Ann NY Acad Sci 516: 631-635 (1987)). Progression of disease symptoms and phenotypes is monitored to assess the effects of the selected uPA polypeptides. Selected uPA polypeptides also can be administered to animal models as well as subjects such as in clinical trials to assess in vivo effectiveness in comparison to placebo controls.

[0547] i. Arterial Thrombosis

[0548] Arterial thrombi form as a result of a rupture in the arterial vessel wall. Most often the rupture occurs in patients with vascular disease, such as atherosclerosis. The arterial thrombi usually form in regions of disturbed blood flow and at sites of rupture due to an atherosclerotic plaque, which exposes the thrombogenic subendothelium to platelets and coagulation proteins, which in turn activate the coagulation cascade. Plaque rupture also can produce further narrowing of the blood vessel due to hemorrhage into the plaque. Nonocclusive thrombi can become incorporated into the vessel wall and can accelerate the growth of atherosclerotic plaques. Formation arterial thrombi can result in ischemia either by obstructing flow or by embolism into the distal microcirculation. Anticoagulants and drugs that suppress platelet function and the coagulation cascade can be effective in the prevention and treatment of arterial thrombosis. Such classes of drugs are effective in the treatment of arterial thrombosis. Arterial thrombosis can lead to conditions of unstable angina and acute myocardial infarction. Selected uPA polypeptides provided herein that inhibit coagulation can be used in the treatment and/or prevention of arterial thrombosis and conditions, such as unstable angina and acute myocardial infarction.

[0549] ii. Venous Thrombosis and Thromboembolism

[0550] Venous thrombosis is a condition in which a blood clot forms in a vein due to imbalances in the signals for clot formation versus clot dissolution, especially in instances of low blood flow through the venous system. Results of thrombus formation can include damage to the vein and valves of the vein, though the vessel wall typically remains intact. The clots can often embolize, or break off, and travel through the blood stream where they can lodge into organ areas such as the lungs (pulmonary embolism), brain (ischemic stroke, transient ischemic attack), heart (heart attack/myocardial infarction, unstable angina), skin (purpura fulminans), and adrenal gland. In some instances the blockage of blood flow can lead to death. Patients with a tendency to have recurrent venous thromboembolism are characterized as having thrombophilia. Risk factors for developing thromboembolic disease include trauma, immobilization, malignant disease, heart failure, obesity, high levels of estrogens, leg paralysis, myocardial infarction, varicose veins, cancers, dehydration, smoking, oral contraceptives, and pregnancy. Genetic studies of families with thrombophilia have shown inheritable high levels coagulation factors, including FVIII, FIX, and FXI (Lavigne et al. J. Thromb. Haemost. 1:2134-2130 (2003)).

[0551] Deep vein thrombosis (DVT) refers the formation of venous blot clot in the deep leg veins. The three main factors that contribute to DVT are injury to the vein lining, increased tendency for the blood to clot and slowing of blood flow. Collectively, these factor are called Virchow's triad. Veins can become injured during trauma or surgery, or as a result of disease condition, such as Buerger's disease or DIC, or another clot. Other contributing factors to development of DVT are similar to that of more general thromboembolic diseases as discussed above. The clot that forms in DVT causes only minor inflammation, thus, allowing it to break loose into the blood stream more easily. Often the thrombus can break off as a result of minor contraction of the leg muscles. Once the thrombus becomes an embolus it can become lodged into vessels of the lungs where is can cause a pulmonary infarction. Patients with high levels of active FIX in their bloodstream are at an increased risk of developing deep vein thrombosis (Weltermann et al. J. Thromb. Haemost. 1(1): 16-18 (2003)).

[0552] Thromboembolic disease can be hereditary, wherein the disease is caused by hereditary abnormalities in clotting factors, thus leading to the imbalance in hemostasis. Several congenital deficiencies include antithrombin III, protein C, protein S, or plasminogen. Other factors include resistance to activated protein C (also termed APC resistance or Factor V leiden effect, in which a mutation in factor V makes it resistant to degradation by protein C), mutation in prothrombin, dysfibrinogemia (mutations confer resistance to fibrinolysis), and hyperhomocysteinemia. Development of thromboembolic disease in younger patients is most often due to the congenital defects described above and is called Juvenile Thrombophilia.

[0553] Treatments for venous thromboembolic disease and DVT typically involve anticoagulant therapy, in which oral doses of heparin and warfarin are administered. Heparin is usually infused into patients to control acute events, followed by longer term oral anticoagulant therapy with warfarin to control future episodes. Other therapies include direct thrombin inhibitors, inhibitors of platelet function, such as aspirin and dextran, and therapies to counteract venous stasis, including compression stockings and pneumatic compression devices. Selected uPA polypeptides provided herein that inhibit blood coagulation can be used in anticoagulant therapies for thromboembolic disease and/or DVT. In some embodiments, selected uPA polypeptides provided herein that inhibit blood coagulation can be used in prevention therapies thromboembolic disease and/or DVT in patients exhibiting risk factors for thromboembolic disease and/or DVT.

[0554] (a) Ischemic Stroke

[0555] Ischemic stroke occurs when the blood flow to the brain is interrupted,

[0556] wherein the sudden loss of circulation to an area of the brain results in a corresponding loss of neurologic function. In contrast to a hemorrhagic stroke, which is characterized by intracerebral bleeding, an ischemic stroke is usually caused by thrombosis or embolism. Ischemic strokes account for approximately 80% of all strokes. In addition to the causes and risk factors for development a thromboembolism as discussed above, processes that cause dissection of the cerebral arteries (e.g., trauma, thoracic aortic dissection, arteritis) can cause thrombotic stroke. Other causes include hypoperfusion distal to a stenotic or occluded artery or hypoperfusion of a vulnerable watershed region between 2 cerebral arterial territories. Treatments for ischemic stroke involve anticoagulant therapy for the prevention and treatment of the condition. Selected uPA polypeptides provided herein that inhibit coagulation can be used in the treatment and/or prevention or reduction of risk of ischemic stroke.

[0557] iii. Acquired Coagulation Disorders

[0558] Acquired coagulation disorders are the result of conditions or diseases, such as vitamin K deficiency, liver disease, disseminated intravascular coagulation (DIC), or development of circulation anticoagulants. The defects in blood coagulation are the result of secondary deficiencies in clotting factors caused by the condition or disease. For example, production of coagulation factors from the liver is often impaired when the liver is in a diseased state. Along with decreased synthesis of coagulation factors, fibrinolysis becomes increased and thrombocytopenia (deficiency in platelets) is increased. Decreased production of coagulation factors by the liver also can result from fulminant hepatitis or acute fatty liver of pregnancy. Such conditions promote intravascular clotting which consumes available coagulation factors. Selected uPA polypeptides provided herein can be used in the treatment of acquired coagulation disorders in order to alleviate deficiencies in blood clotting factors.

[0559] (a) Disseminated Intravascular Coagulation (DIC)

[0560] Disseminated intravascular coagulation (DIC) is a disorder characterized by a widespread and ongoing activation of coagulation. In DIC, there is a loss of balance between thrombin activation of coagulation and plasmin degradation of blot clots. Vascular or microvascular fibrin deposition as a result can compromise the blood supply to various organs, which can contribute to organ failure. In sub-acute or chronic DIC, patients present with a hypercoagulatory phenotype, with thromboses from excess thrombin formation, and the symptoms and signs of venous thrombosis can be present. In contrast to acute DIC, sub-acute or chronic DIC is treated by methods of alleviating the hyperthrombosis, including heparin, anti-thrombin III and activated protein C treatment. The selected uPA polypeptides provided herein and the nucleic acids encoding the selected uPA polypeptides provided herein can be used in therapies for sub-acute or chronic DIC. In one embodiment, the sub-acute or chronic DIC polypeptides herein, and nucleic acids encoding the selected uPA polypeptides can be used in combination with other anticoagulation therapies. Selected uPA polypeptides can be tested for therapeutic effectiveness, for example, by using animal models. Progression of disease symptoms and phenotypes is monitored to assess the effects of the selected uPA polypeptides. Selected uPA polypeptides also can be administered to animal models as well as subjects such as in clinical trials to assess in vivo effectiveness in comparison to placebo controls.

[0561] (b) Bacterial Infection and Periodontitis

[0562] Systemic infection with microorganisms, such as bacteria, is commonly associated with DIC. The upregulation of coagulation pathways can be mediated in part by cell membrane components of the microorganism (lipopolysaccharide or endotoxin) or bacterial exotoxins (e.g. staphylococcal alpha toxin) that cause inflammatory responses leading to elevated levels of cytokines. The cytokines, in turn, can influence induction of coagulation.

[0563] Bacterial pathogens, such as Porphyrus gingivalis, are well-known as causative agents for adult periodontitis. The Porphyrus gingivalis bacterium produces arginine-specific cysteine proteinases that function as virulence factors (Grenier et al. J. Clin. Microbiol. 25:738-740 (1987), Smalley et al. Oral Microbiol. Immunol. 4:178-181 (1989), Marsh, et al. FEMS Microbiol. 59:181-185 (1989), and Potempa et al. J. Biol. Chem. 273:21648-21657 (1998). Porphyrus gingivalis generated two proteinases that are referred to as 50 kDa and 95 kDa gingipains R (RgpB and HRgpA, respectively). The protease can proteolytically cleave and hence activate coagulation factors. During bacterial infection release of the gingipains R into the blood stream can thus lead to uncontrolled activation of the coagulation cascade leading to overproduction of thrombin and increase the possibility of inducing disseminated intravascular coagulation (DIC). The large increases in thrombin concentrations can furthermore contribute alveolar bone resorption by osteoclasts at sites of periodontitis.

[0564] The selected uPA polypeptides provided herein that inhibit blood coagulation, and nucleic acids encoding selected uPA polypeptides can be used in treatment of periodontitis. Selected uPA polypeptides can be tested for therapeutic effectiveness for airway responsiveness in periodontitis models. Such models are available in animals, such as nonhuman primates, dogs, mice, rats, hamsters, and guinea pigs (Weinberg and Bral, J. of Periodontology 26(6), 335-340). Selected uPA polypeptides also can be administered to animal models as well as subjects such as in clinical trials to assess in vivo effectiveness in comparison to placebo controls.

[0565] b. Other tPA Target-Associated Conditions

[0566] The selected uPA polypeptides provided herein also can be used in treatment of neurological conditions for which tPA had been implicated. tPA is thought to regulate physiological processes that include tissue remodeling and plasticity due to the ability of tPA to hydrolyze extracellular matrix proteins and other substrates (Gravanis and Tsirska (2004) Glia 49:177-183). Patients who have experienced events such as stroke or injury (e.g., due to accident or surgery) often suffer from neurological damage that can be treatable with selected uPA polypeptides provided herein. The selected uPA polypeptides provided herein can be useful for treating subjects suffering from a variety of neurological diseases and conditions including, but not limited to, neurodegenerative diseases such as multiple sclerosis, amyotrophic lateral sclerosis, subacute sclerosing panencephalitis, Parkinson's disease, Huntington's disease, muscular dystrophy, and conditions caused by nutrient deprivation or toxins (e.g., neurotoxins, drugs of abuse). Additionally, selected uPA polypeptides can be useful for providing cognitive enhancement and/or for treating cognitive decline, e.g., “benign senescent forgetfulness”, “age-associated memory impairment”, “age-associated cognitive decline”, etc. (Petersen et al., J Immunological Meth. 257:107-116 (2001)), and Alzheimer's disease.

[0567] Selected uPA polypeptides can be tested using any of a variety of animal models for injury to the nervous system. Models that can be used include, but are not limited to, rodent, rabbit, cat, dog, or primate models for thromboembolic stroke (Krueger and Busch, Invest. Radiol. 37:600-8 (2002); Gupta and Briyal, Indian J. Physiol. Pharmacol. 48:379-94 (2004)), models for spinal cord injury (Webb et al., Vet. Rec. 155:225-30 (2004)), etc. The methods and compositions also can be tested in humans. A variety of different methods, including standardized tests and scoring systems, are available for assessing recovery of motor, sensory, behavioral, and/or cognitive function in animals and humans. Any suitable method can be used. In one example, the American Spinal Injury Association score, which has become the principal instrument for measuring the recovery of sensory function in humans, could be used. See, e.g., Martinez-Arizala, J Rehabil. Res. Dev. 40:35-9 (2003), Thomas and Noga, J Rehabil. Res. Dev. 40:25-33 (2003), Kesslak and Keirstead, J Spinal Cord Med. 26:323-8 (2003) for examples of various scoring systems and methods. Preferred dose ranges for use in humans can be established by testing the agent(s) in tissue culture systems and in animal models taking into account the efficacy of the agent(s) and also any observed toxicity.

[0568] c. Diagnostic Methods

[0569] Selected uPA polypeptides provided herein can be used in diagnostic methods including, but not limited to, diagnostic assays to detect fibrin and fibrin degradation products that have altered activities. The assays are thus indicated in thrombotic conditions. Other diagnostic applications, include kits containing antibodies against the selected uPA polypeptides and are familiar to one of ordinary skill in the art.

### 2. Exemplary Methods of Treatment for Selected Protease Polypeptides that Cleave VEGF or VEGFR Targets

[0570] Vascular endothelial growth factor (VEGF) is a cytokine that binds and signals through a specific cell surface receptor (VEGFR) to regulate angiogenesis, the process in which new blood vessels are generated from existing vasculature. Pathological angiogenesis describes the increased vascularization associated with disease and includes events such as the growth of solid tumors (McMahon, (2000) Oncologist. 5 Suppl 1:3-10), macular degeneration and diabetes. In cancer, solid tumors require an ever-increasing blood supply for growth and metastasis. Hypoxia or oncogenic mutation increases the levels of VEGF and VEGF-R mRNA in the tumor and surrounding stromal cells leading to the extension of existing vessels and formation of a new vascular network. In wet macular degeneration, abnormal blood vessel growth forms beneath the macula. These vessels leak blood and fluid into the macula damaging photoreceptor cells. In diabetes, a lack of blood to the eyes also can lead to blindness. VEGF stimulation of capillary growth around the eye leads to disordered vessels which do not function properly.

[0571] Three tyrosine kinase family receptors of VEGF have been identified (VEGFR-1/Flt-1, VEGF-R-2/Flk-1/KDR, VEGF-R-3/Flt-4). KDR (the mouse homolog is Flk-1) is a high affinity receptor of VEGF with a Kd of 400-800 μM (Waltenberger, (1994) J Biol. Chem. 269(43):26988-95) expressed exclusively on endothelial cells. VEGF and KDR association has been identified as a key endothelial cell-specific signaling pathway required for pathological angiogenesis (Kim, (1993) Nature. 362 (6423):841-4; Millauer, (1994) Nature. 367 (6463):576-9; Yoshiji, (1999) Hepatology. 30(5): 1179-86). Dimerization of the receptor upon ligand binding causes autophosphorylation of the cytoplasmic domains, and recruitment of binding partners that propagate signaling throughout the cytoplasm and into the nucleus to change the cell growth programs. Treatment of tumors with a soluble VEGF-R2 inhibits tumor growth (Lin, (1998) Cell Growth Differ. 9(1):49-58), and chemical inhibition of phosphorylation causes tumor cells to become apoptotic (Shaheen, (1999) Cancer Res. 59(21):5412-6).

[0572] Signaling by vascular endothelial growth factor (VEGF) and its receptors is implicated in pathological angiogenesis and the rapid development of tumor vasculature in cancer. Drugs that block this signaling pathway prevent the growth and maintenance of tumor blood supply, and lead to the systematic death of the tumor. The recent success of the anti-VEGF antibody AVASTIN™ in patients with metastatic colon cancer has validated VEGF as a target for anti-angiogenic therapy of cancer. Despite these encouraging results, tumor progression has still occurred despite anti-VEGF treatment. The mechanisms of antibody affecting VEGF function and how the antibody impedes tumor growth are unknown. Knock down experiments show that blocking VEGF function blocks angiogenesis. Thus the inhibition of angiogenic signaling through VEGFR-2 represents an underdeveloped therapeutic area ideal for the development of engineered proteases with novel targeting.

[0573] Therapies targeting the VEGF receptors and Flk-1/KDR specifically have inhibited pathological angiogenesis and shown reduction of tumor size in multiple mouse models of human and mouse solid tumors (Prewett, (1999) Cancer Res. 59(20):5209-18; Fong, (1999) Neoplasia 1(1):31-41. Erratum in: (1999) Neoplasia 1(2):183) alone and in combination with cytotoxic therapies (Klement, (2000) J Clin Invest. 105(8):R15-24). Studies with small molecule inhibitors and antibodies validate the VEGF receptor family as a potent anti-angiogenesis target but more effective therapeutics are still needed.

[0574] VEGFR is composed of an extracellular region of seven immunoglobin (Ig)-like domains, a transmembrane region, and two cytoplasmic tyrosine kinase domains. The first three Ig-like domains have been shown to regulate ligand binding, while domains 4 through 7 have a role in inhibiting correct dimerization and signaling in the absence of ligand. As a target for selective proteolysis by engineered proteases, it has the following promising target characteristics: a labile region of amino acids accessible to proteolysis; high sequence identity between the human, rat and mouse species; down regulation of signaling upon cleavage; and proteolytic generation of soluble receptors able to non-productively bind ligand. Several regions of VEGF-R2 are available for specific proteolysis including the stalk region before the transmembrane region and unstructured loop between Ig-like domains. In one example, serine-like proteases provided herein can be engineered to cleave specific target receptors between their transmembrane and cytokine or growth factor binding domains (e.g. VEGFR). The stalk regions that function to tether protein receptors to the surface of a cell or loop regions are thereby disconnected from the globular domains in a polypeptide chain.

[0575] a. Angiogenesis, Cancer, and Other Cell Cycle Dependent Diseases or Conditions

[0576] Exemplary selected proteases provided herein cleave a VEGF or VEGFR which are responsible for modulation of angiogenesis. Where the cell surface molecule is a VEGFR signaling in tumor angiogenesis, cleavage prevents the spread of cancer. For example, cleavage of a cell surface domain from a VEGFR molecule can inactivate its ability to transmit extracellular signals, especially cell proliferation signals. Without angiogenesis to feed the tumor, cancer cells often cannot proliferate. In one embodiment, a selected protease provided herein is therefore used to treat cancer. Also, cleavage of VEGFR can be used to modulate angiogenesis in other pathologies, such as macular degeneration, inflammation and diabetes. In one embodiment, cleaving a target VEGF or VEGFR protein involved in cell cycle progression inactivates the ability of the protein to allow the cell cycle to go forward. Without the progression of the cell cycle, cancer cells can not proliferate. Therefore, the selected proteases provided herein which cleave VEGF or VEGFR are used to treat cancer and other cell cycle dependent pathologies.

[0577] Selected proteases provided herein also can cleave soluble proteins that are responsible for tumorigenicity. Cleaving VEGF polypeptide prevents signaling through the VEGF receptor and decreases angiogenesis, thus decreasing disease in which angiogenesis plays a role, such as cancer, macular degeneration, inflammation and diabetes. Further, VEGF signaling is responsible for the modulation of the cell cycle in certain cell types. Therefore, the selected proteases provided herein which cleave VEGF are useful in the treatment of cancer and other cell cycle dependent pathologies.

[0578] b. Combination Therapies with Selected Proteases that Cleave VEGF or VEGFR

[0579] In one embodiment, treatment of a pathology, such as a cancer, involves administration to a subject in need thereof therapeutically effective amounts of a protease that specifically cleaves and inactivates the signaling of the VEGF/VEGFR-2 complex, such as in combination with at least one anti-cancer agent. Antiangiogenic therapy has proven successful against both solid cancers and hematological malignancies. (See, e.g., Ribatti et al. (2003) J Hematother Stem Cell Res. 12(1), 11-22). Therefore, compositions provided herein as antiangiogenic therapy can facilitate the treatment of both hematological and sold tissue malignancies. Compositions and methods of treatment provided herein can be administered alone or in combination with any other appropriate anti-cancer treatment known to one skilled in the art. For example, the selected proteases provided herein can be administered in combination with or in place of AVASTIN™ in any therapy where AVASTIN™ administration provides therapeutic benefit.

[0580] In one embodiment, the anti-cancer agent is at least one chemotherapeutic agent. In a related embodiment, the administering of the protease is in combination with at least one radiotherapy. Administration of the combination therapy will attenuate the angiogenic signal and create a pool of soluble receptor that lowers free VEGF levels. In a specific embodiment, a selected protease provided herein has an in vitro specificity that matches a critical region of the receptor, the Flk-1/KDR stalk, over a six amino acid region.

[0581] The selected protease polypeptides provided herein can be administered in a composition containing more than one therapeutic agent. The therapeutic agents can be the same or different, and can be, for example, therapeutic radionuclides, drugs, hormones, hormone antagonists, receptor antagonists, enzymes or proenzymes activated by another agent, autocrines, cytokines or any suitable anti-cancer agent known to those skilled in the art. In one embodiment, the anti-cancer agent co-administered with the selected protease polypeptide is AVASTIN™. Other therapeutic agents useful in the methods provided herein include toxins, anti-DNA, anti-RNA, radiolabeled oligonucleotides, such as antisense oligonucleotides, anti-protein and anti-chromatin cytotoxic or antimicrobial agents. Other therapeutic agents are known to those skilled in the art, and the use of such other therapeutic agents in accordance with the method provided herein is specifically contemplated.

[0582] The antitumor agent can be one of numerous chemotherapy agents such as an alkylating agent, an antimetabolite, a hormonal agent, an antibiotic, an antibody, an anti-cancer biological, Gleevec, colchicine, a vinca alkaloid, L-asparaginase, procarbazine, hydroxyurea, mitotane, nitrosoureas or an imidazole carboxamide. Suitable agents are those agents that promote depolarization of tubulin or prohibit tumor cell proliferation. Chemotherapeutic agents contemplated include, but are not limited to, anti-cancer agents listed in the Orange Book of Approved Drug Products With Therapeutic Equivalence Evaluations, as compiled by the Food and Drug Administration and the U.S. Department of Health and Human Services. In addition to the above chemotherapy agents, the serine protease-like proteases provided herein also can be administered together with radiation therapy treatment. Additional treatments known in the art are contemplated.

[0583] The therapeutic agent can be a chemotherapeutic agent. Chemotherapeutic agents are known in the art and include at least the taxanes, nitrogen mustards, ethylenimine derivatives, alkyl sulfonates, nitrosoureas, triazenes, folic acid analogs, pyrimidine analogs, purine analogs, vinca alkaloids, antibiotics, enzymes, platinum coordination complexes, substituted urea, methyl hydrazine derivatives, adrenocortical suppressants, or antagonists. More specifically, the chemotherapeutic agents can be one or more agents chosen from the non-limiting group of steroids, progestins, estrogens, antiestrogens, or androgens. Even more specifically, the chemotherapy agents can be azaribine, bleomycin, bryostatin-1, busulfan, carmustine, chlorambucil, cisplatin, CPT-11, cyclophosphamide, cytarabine, dacarbazine, dactinomycin, daunorubicin, dexamethasone, diethylstilbestrol, doxorubicin, ethinyl estradiol, etoposide, fluorouracil, fluoxymesterone, gemcitabine, hydroxyprogesterone caproate, hydroxyurea, L-asparaginase, leucovorin, lomustine, mechlorethamine, medroprogesterone acetate, megestrol acetate, melphalan, mercaptopurine, methotrexate, methotrexate, mithramycin, mitomycin, mitotane, phenyl butyrate, prednisone, procarbazine, semustine streptozocin, tamoxifen, taxanes, taxol, testosterone propionate, thalidomide, thioguanine, thiotepa, uracil mustard, vinblastine, or vincristine. The use of any combinations of chemotherapy agents also is contemplated. The administration of the chemotherapeutic agent can be before, during or after the administration of the serine protease-like mutein polypeptide.

[0584] Other suitable therapeutic agents for use in combination or for co-administration with the selected protease polypeptides provided herein are selected from the group consisting of radioisotope, boron addend, immunomodulator, toxin, photoactive agent or dye, cancer chemotherapeutic drug, antiviral drug, antifungal drug, antibacterial drug, antiprotozoal drug and chemosensitizing agent (See, U.S. Pat. Nos. 4,925,648 and 4,932,412). Suitable chemotherapeutic agents are described, for example, in REMINGTON'S PHARMACEUTICAL SCIENCES, 19th Ed. (Mack Publishing Co. 1995), and in Goodman and Gilman's THE PHARMACOLOGICAL BASIS OF THERAPEUTICS (Goodman et al., Eds. Macmillan Publishing Co., New York, 1980 and 2001 editions). Other suitable chemotherapeutic agents, such as experimental drugs, are known to those of skill in the art. Moreover a suitable therapeutic radioisotope is selected from the group consisting of ax-emitters, β-emitters, γ-emitters, Auger electron emitters, neutron capturing agents that emit α-particles and radioisotopes that decay by electron capture. Preferably, the radioisotope is selected from the group consisting of ²²⁵Ac, ¹⁹⁸Au, ³²P, ¹³¹I, ¹³¹I, ⁹⁰Y, ¹⁸⁶Re, ¹⁸⁸Re, ⁶⁷Cu, ¹⁷⁷Lu, ²¹³Bi, ¹⁰B, and ²¹¹At.

[0585] Where more than one therapeutic agent is used in combination with the selected proteases provided herein, they can be of the same class or type or can be from different classes or types. For example, the therapeutic agents can comprise different radionuclides, or a drug and a radionuclide.

[0586] In another embodiment, different isotopes that are effective over different distances as a result of their individual energy emissions are used as first and second therapeutic agents in combination with the proteases provided herein. Such agents can be used to achieve more effective treatment of tumors, and are useful in patients presenting with multiple tumors of differing sizes, as in normal clinical circumstances.

[0587] Few of the available isotopes are useful for treating the very smallest tumor deposits and single cells. In these situations, a drug or toxin can be a more useful therapeutic agent for co-administration with a protease provided herein. Accordingly, in some embodiments, isotopes are used in combination with non-isotopic species such as drugs, toxins, and neutron capture agents and co-administered with a protease provided herein. Many drugs and toxins are known which have cytotoxic effects on cells, and can be used in combination with the proteases provided herein. They are to be found in compendia of drugs and toxins, such as the Merck Index, Goodman and Gilman, and the like, and in the references cited above.

[0588] Drugs that interfere with intracellular protein synthesis also can be used in combination with a protease in the therapeutic the methods herein; such drugs are known to those skilled in the art and include puromycin, cycloheximide, and ribonuclease.

[0589] The therapeutic methods provided herein can be used for cancer therapy. It is well known that radioisotopes, drugs, and toxins can be conjugated to antibodies or antibody fragments which specifically bind to markers which are produced by or associated with cancer cells, and that such antibody conjugates can be used to target the radioisotopes, drugs or toxins to tumor sites to enhance their therapeutic efficacy and minimize side effects. Examples of these agents and methods are reviewed in Wawrzynczak and Thorpe (in Introduction to the Cellular and Molecular Biology of Cancer, L. M. Franks and N. M. Teich, eds, Chapter 18, pp. 378-410, Oxford University Press. Oxford, 1986), in Immunoconjugates: Antibody Conjugates in Radioimaging and Therapy of Cancer (C. W. Vogel, ed., 3-300, Oxford University Press, N.Y., 1987), in Dillman, R. O. (CRC Critical Reviews in Oncology/Hematology 1:357, CRC Press, Inc., 1984), in Pastan et al. (Cell 47:641, 1986) in Vitetta et al. (Science 238:1098-1104, 1987) and in Brady et al. (Int. J. Rad. Oncol. Biol. Phys. 13:1535-1544, 1987). Other examples of the use of immunoconjugates for cancer and other forms of therapy have been disclosed, inter alia, in U.S. Pat. Nos. 4,331,647, 4,348,376, 4,361,544, 4,468,457, 4,444,744, 4,460,459, 4,460,561 4,624,846, 4,818,709, 4,046,722, 4,671,958, 4,046,784, 5,332,567, 5,443,953, 5,541,297, 5,601,825, 5,635,603, 5,637,288, 5,677,427, 5,686,578, 5,698,178, 5,789,554, 5,922,302, 6,187,287, and 6,319,500.

[0590] Additionally, the treatment methods provided herein include those in which a selected protease herein is used in combination with other compounds or techniques for preventing, mitigating or reversing the side effects of certain cytotoxic agents. Examples of such combinations include, e.g., administration of IL-1 together with an antibody for rapid clearance, as described in e.g., U.S. Pat. No. 4,624,846. Such administration can be performed from 3 to 72 hours after administration of a primary therapeutic treatment with a granzyme B mutein or MT-SP1 mutein in combination with an anti-cancer agent (e.g., with a radioisotope, drug or toxin as the cytotoxic component). This can be used to enhance clearance of the conjugate, drug or toxin from the circulation and to mitigate or reverse myeloid and other hematopoietic toxicity caused by the therapeutic agent.

[0591] In another example, and as noted above, cancer therapy can involve a combination of more than one tumoricidal agent, e.g., a drug and a radioisotope, or a radioisotope and a Boron-10 agent for neutron-activated therapy, or a drug and a biological response modifier, or a fusion molecule conjugate and a biological response modifier. The cytokine can be integrated into such a therapeutic regimen to maximize the efficacy of each component thereof.

[0592] Similarly, certain antileukemic and antilymphoma antibodies conjugated with radioisotopes that are β or α-emitters can induce myeloid and other hematopoietic side effects when these agents are not solely directed to the tumor cells. This is observed particularly when the tumor cells are in the circulation and in the blood-forming organs. Concomitant and/or subsequent administration of at least one hematopoietic cytokine (e.g., growth factors, such as colony stimulating factors, such as G-CSF and GM-CSF) is preferred to reduce or ameliorate the hematopoietic side effects, while augmenting the anticancer effects.

[0593] It is well known in the art that various methods of radionuclide therapy can be used for the treatment of cancer and other pathological conditions, as described, e.g., in Harbert, “Nuclear Medicine Therapy”, New York, Thieme Medical Publishers, 1087, pp. 1-340. A clinician experienced in these procedures will readily be able to adapt the cytokine adjuvant therapy described herein to such procedures to mitigate any hematopoietic side effects thereof. Similarly, therapy with cytotoxic drugs, co-administered with a protease mutein, can be used, e.g., for treatment of cancer, infectious or autoimmune diseases, and for organ rejection therapy. Such treatment is governed by analogous principles to radioisotope therapy with isotopes or radiolabeled antibodies. Thus, the ordinary skilled clinician will be able to adapt the description of cytokine use to mitigate marrow suppression and other such hematopoietic side effects by administration of the cytokine before, during and/or after the primary anti-cancer therapy.

### 3. Exemplary Methods of Treatment for Selected MT-SP1 Polypeptides that Cleave Complement Protein Targets

[0594] The protease polypeptides and nucleic acid molecules provided herein can be used for treatment of any condition for which activation of the complement pathway is implicated, particularly inflammatory conditions including acute inflammatory conditions, such as septic shock, and chronic inflammatory conditions, such as Rheumatoid Arthritis (RA). Acute and inflammatory conditions can be manifested as an immune-mediated disease such as for example autoimmune disease or tissue injury caused by immune-complex-mediated inflammation. A complement-mediated inflammatory condition also can be manifested as a neurodegenerative or cardiovascular disease that have inflammatory components. This section provides exemplary uses of, and administration methods for, proteases. These described therapies are exemplary and do not limit the applications of proteases. Such methods include, but are not limited to, methods of treatment of physiological and medical conditions described and listed below. Such methods include, but are not limited to, methods of treatment of sepsis, Rheumatoid arthritis (RA), membranoproliferative glomerulonephritis (MPGN), lupus erythematosus, Multiple Sclerosis (MS), Myasthenia gravis (MG), asthma, inflammatory bowel disease, respiratory distress syndrome, immune complex (IC)-mediated acute inflammatory tissue injury, multi-organ failure, Alzheimer's Disease (AD), Ischemia-reperfusion injuries caused by events or treatments such as myocardial infarct (MI), stroke, cardiopulmonary bypass (CPB) or coronary artery bypass graft, angioplasty, or hemodialysis, or Guillan Barre syndrome.

[0595] Treatment of diseases and conditions with proteases can be effected by any suitable route of administration using suitable formulations as described herein including, but not limited to, subcutaneous injection, oral and transdermal administration. If necessary, a particular dosage and duration and treatment protocol can be empirically determined or extrapolated. For example, exemplary doses of recombinant and native protease polypeptides can be used as a starting point to determine appropriate dosages. Modified proteases that have more specificity and/or selectivity compared to a wildtype or scaffold protease can be effective at reduced dosage amounts and or frequencies. Dosage levels can be determined based on a variety of factors, such as body weight of the individual, general health, age, the activity of the specific compound employed, sex, diet, time of administration, rate of excretion, drug combination, the severity and course of the disease, and the patient's disposition to the disease and the judgment of the treating physician. The amount of active ingredient that can be combined with the carrier materials to produce a single dosage form with vary depending upon the host treated and the particular mode of administration.

[0596] Upon improvement of a patient's condition, a maintenance dose of a compound or compositions can be administered, if necessary; and the dosage, the dosage form, or frequency of administration, or a combination thereof can be modified. In some cases, a subject can require intermittent treatment on a long-term basis upon any recurrence of disease symptoms.

[0597] a. Immune-Mediated Inflammatory Diseases

[0598] Proteases and modified proteases selected in the method described herein, including but not limited to variant MT-SP 1 proteases provided herein, can be used to treat inflammatory diseases. Inflammatory diseases that can be treated with proteases include acute and chronic inflammatory diseases. Exemplary inflammatory diseases include central nervous system diseases (CNS), autoimmune diseases, airway hyper-responsiveness conditions such as in asthma, rheumatoid arthritis, inflammatory bowel disease, and immune complex (IC)-mediated acute inflammatory tissue injury.

[0599] Experimental autoimmune encephalomyelitis (EAE) can serve as a model for multiple sclerosis (MS) (Piddlesden et al., (1994) J Immunol 152:5477). EAE can be induced in a number of genetically susceptible species by immunization with myelin and myelin components such as myelin basic protein, proteolipid protein and myelin oligodendrocyte glycoprotein (MOG). For example, MOG-induced EAE recapitulates essential features of human MS including the chronic, relapsing clinical disease course the pathohistological triad of inflammation, reactive gliosis, and the formation of large confluent demyelinated plaques. Proteases and modified proteases can be assessed in EAE animal models. Proteases are administered, such as by daily intraperitoneal injection, and the course and progression of symptoms is monitored compared to control animals. The levels of inflammatory complement components that can exacerbate the disease also can be measured by assaying serum complement activity in a hemolytic assay and by assaying for the deposition of complement components, such as for example C1, C3 and C9.

[0600] Complement activation modulates inflammation in diseases such as rheumatoid arthritis (RA) (Wang et al., (1995) PNAS 92:8955). Proteases and modified proteases, including variant MT-SP1 polypeptides provided herein, can be used to treat RA. For example, proteases can be injected locally or systemically. Proteases can be dosed daily or weekly. PEGylated proteases can be used to reduce immunogenicity. In one example, type II collagen-induced arthritis (CIA) can be induced in mice as a model of autoimmune inflammatory joint disease that is histologically similar to RA characterized by inflammatory synovitis, pannus formation, and erosion of cartilage and bone. To induce CIA, bovine type II collagen (B-CII) in the presence of complete Freund's adjuvant can be injected intradermally at the base of the tail. After 21 days, mice can be reimmunized using the identical protocol. To examine the effects of a protease or modified protease, including MT-SP1 polypeptides, 3 weeks following the initial challenge with B-CII, a protease or control can be administered intraperitoneally twice weekly for 3 weeks. Mice can be sacrificed 7 weeks following the initial immunization for histologic analysis. To assess the therapeutic affect of a protease on established disease, a protease can be administered daily for a total of 10 days following the onset of clinical arthritis in one or more limbs. The degree of swelling in the initially affected joints can be monitored by measuring paw thickness using calipers. In both models, serum can be drawn from mice for hemolytic assays and measurement of complement markers of activation such as for example C5a and C5b-9. In another example, primate models are available for RA treatments. Response of tender and swollen joints can be monitored in subjects treated with protease polypeptides and controls to assess protease treatment.

[0601] Proteases or modified proteases, including but not limited to variant MT-SP1 polypeptides provided herein, can be used to treat immune complex (IC)-mediated acute inflammatory tissue injury. IC-mediated injury is caused by a local inflammatory response against IC deposition in a tissue. The ensuing inflammatory response is characterized by edema, neutrophila, hemorrhage, and finally tissue necrosis. IC-mediated tissue injury can be studied in an in vivo Arthus (RPA) reaction. Briefly, in the RPA reaction, an excess of antibody (such as for example rabbit IgG anti-chicken egg albumin) is injected into the skin of animals, such as for example rats or guinea pigs, that have previously been infused intravenously with the corresponding antigen (i.e. chicken egg albumin) (Szalai et al., (2000) J Immunol 164:463). Immediately before the initiation on an RPA reaction, a protease, or a bolus control, can be administered at the same time as the corresponding antigen by an intravenous injection via the right femoral vein. Alternatively, a protease can be administered during the initial hour of the RPA reaction, beginning immediately after injection of the antigen and just before dermal injection of the antibody. The effects of a protease on the generation of complement-dependent IC-mediated tissue injury can be assessed at various times after initiation of RPA by collecting blood to determine the serum hemolytic activity, and by harvesting the infected area of the skin for quantitation of lesion size.

[0602] Therapeutic proteases, such as those described herein including variant MT-SP1 polypeptides provided herein, can be used to treat sepsis and severe sepsis that can result in lethal shock. A model of complement-mediated lethal shock can be used to test the effects of a protease as a therapeutic agent. In one such example, rats can be primed with a trace amount of lipopolysaccharide (LPS), followed by the administration of a monoclonal antibody against a membrane inhibitor of complement (anti-Crry) (Mizuno M et al., (2002) Int Arch Allergy Immunol 127:55). A protease or control can be administered at any time during the course of initiation of lethal shock such as before LPS priming, after LPS priming, or after anti-Crry administration and the rescue of rats from lethal shock can be assessed.

[0603] b. Neurodegenerative Disease

[0604] Complement activation exacerbates the progression of Alzheimer's disease (AD) and contributes to neurite loss in AD brains. Proteases and modified proteases described herein, including but not limited to variant MT-SP1 polypeptides provided herein, can be used to treat AD. Mouse models that mimic some of the neuropathological and behavioral features of AD can be used to assess the therapeutic effects of proteases. Examples of transgenic mouse models include introducing the human amyloid precursor protein (APP) or the presenilin 1 (PS1) protein with disease-producing mutations into mice under the control of an aggressive promoter. These mice develop characteristics of AD including increases in beta-amyloid plaques and dystrophic neurites. Double transgenic mice for APP and PSI mutant proteins develop larger numbers of fibrillar beta-amyloid plaques and show activated glia and complement factors associated with the plaque. Proteases can be administered, such as by daily intraperitoneal or intravenous injections, and the course and progression of symptoms is monitored compared to control animals.

[0605] c. Cardiovascular Disease

[0606] Proteases and modified proteases described herein, including but not limited to variant MT-SP1 proteases provided herein, can be used to treat cardiovascular disease. Proteases can be used in the treatment of cardiovascular diseases including ischemia reperfusion injury resulting from stroke, myocardial infarction, cardiopulmonary bypass, coronary artery bypass graft, angioplasty, or hemodialysis. Proteases also can be used in the treatment of the inflammatory response associated with cardiopulmonary bypass that can contribute to tissue injury. Generally, a protease can be administered prior to, concomitantly with, or subsequent to a treatment or event that induces a complement-mediated ischemia reperfusion injury. In one example, a protease can be administered to a subject prior to the treatment of a subject by a complement-mediated, ischemic-injury inducing event, such as for example coronary artery bypass graft of angioplasty.

[0607] Effects of a protease on treatment of ischemia reperfusion injury can be assessed in animal models of the injury. In one such model, myocardial ischemia is induced in rabbits that have had an incision made in their anterior pericardium by placing a 3-0 silk suture around the left anterior descending (LAD) coronary artery 5-8 mm from its origin and tightening the ligature so that the vessel becomes completely occluded (Buerke et al., (2001) J Immunol 167:5375). A protease, such as for example a variant MT-SP1 polypeptide provided herein, or a control vehicle such as saline, can be given intravenously in increasing doses as a bolus 55 minutes after the coronary occlusion (i.e. 5 minutes before reperfusion). Five minutes later (i.e. after a total of 60 minutes of ischemia) the LAD ligature can be untied and the ischemic myocardium can be reperfused for 3 hours. At the end of the reperfusion period, the ligature around the LAD is tightened. Effects of a protease on ischemia injury can be analyzed by assessing effects on myocardial necrosis, plasma creatine kinase levels, and markers of neutrophil activation such as for example myeloperoxidase activity and superoxide radical release.

[0608] In another model of complement-mediated myocardial injury sustained upon perfusion of isolated mouse hearts with Krebs-Henseleit buffer containing 6% human plasma, treatment with proteases or modified proteases can be used to limit tissue damage to the heart. In such an example, the buffer used to perfuse the hearts can be supplemented with varying doses of proteases, such as but not limited to variant proteases including MT-SP1 polypeptides polypeptides provided herein. The perfused hearts can be assayed for deposition of human C3 and C5b-9, coronary artery perfusion pressure, end-diastolic pressure, and heart rate.

[0609] Proteases and modified proteases, such as for example variant MT-S P1 polypeptides provided herein, can be used as therapeutics prior to or following Cardiopulmonary Bypass (CPB) or coronary artery bypass graft to inhibit the inflammatory immune response that often follows bypass and that can contribute to tissue injury. An in vitro recirculation of whole blood in an extracorporeal bypass circuit can be used to stimulate platelet and leukocyte changes and complement activation induced by CPB (Rinder et al. (1995) J. Clin. Invest. 96:1564). In such a model, addition of a protease or modified protease or control buffer, in varying doses, can be added to a transfer pack already containing blood from a healthy donor and porcine heparin, just prior to addition of the blood to the extracorporeal circuit. Blood samples can be drawn at 5, 15, 30, 45, 60, 75, and 90 minutes after recirculation and assayed for complement studies such as for example hemolytic assays and/or complement activation assays to measure for C5a, C3a, and/or sC5b-9. A pretreatment sample of blood drawn before its addition to the extracorporeal circuit can be used as a control. Flow cytometry of blood samples can be performed to determine levels of adhesion molecules on populations of circulating leukocytes (i.e. neutrophils) in the blood such as for example CD11b and P-selectin levels.

### K. EXAMPLES

[0610] The following examples are included for illustrative purposes only and are not intended to limit the scope of the invention.

### Example 1

### Mutant PAI-1 Inhibitors

### A. EXPRESSION AND PURIFICATION OF MUTANT PAI-1 Inhibitors

[0611] The pPAIST7HS, recombinant plasmid carrying the cDNA of human PAI-1 (encoding mature PAI-1 containing an N-terminal Met as set forth in SEQ ID NO:396), was used as template to introduce modifications into the amino acid sequence of the PAI-1 reactive center loop. Plasmid pPAISTHS is a derivative of plasmid pPAIST7 lacking the HindIII site at nucleotide pair 1 and the SalI site at nucleotide pair 2106. Plasmid pPAIST7 was generated as described (Franke et al. (1990) Biochimic et Biophysica Acta 1037: 16-23). Briefly, the PAI-1 cDNA clone pPAI-11RB was cleaved with restriction endonucleases ApaLI and PflMI, and the 1127 bp fragment of PAI-1 containing 2 bp of the codon for residue I of PAI-1 and the full coding sequence for residues 2-376 of the 379-residue protein was purified by gel electrophoresis. Synthetic linkers were constructed to reconstruct both ends of the PAI-1 cDNA coding sequence and to introduce an ATG protein synthesis initiation codon immediately before the triplet encoding the first residue of mature PAI-1 generating a mature PAI-1 having a sequence of amino acids set forth in SEQ ID NO:396. In addition, to facilitate insertion of the cDNA coding region into plasmid pBR322, the linkers were designed to generate EcoRI and HindIII restriction endonuclease sites at the 5′ and 3′ termini, respectively, of the PAI-1 cDNA fragment. The synthetic linkers are as follows: N-terminus, 5′AATTCTATGG-3′ (SEQ ID NO:392) and 5′-TGCACCATAG-3′ (SEQ ID NO:393); C-terminus, 5′-ATGGAACCCTGAA-3′ (SEQ ID NO:394) and 5′-AGCTTCAGGGTTCCATCAC-3′ (SEQ ID NO:395). The linkers were treated with polynucleotide kinase before use. The synthetic linkers (10 bp at the 5′ end and 13 bp at the 3′ end) were then ligated with the 1127 bp ApaLI-PflMI DNA fragment, digested with EcoRI and HindIII and the 1146 bp EcoRI-HindIII fragment was isolated by gel electrophoresis and cloned into EcoRI and HindIII cleaved pBR322 (SEQ ID NO:377).

[0612] To initiate construction of the pPAIST-7 expression plasmid, the subclone in the pBR322 vector was cleaved with EcoRI and the linear plasmid was dephosphorylated using bacterial alkaline phosphatase. Using a 360 bp EcoRI DNA fragment from pC5A-48 containing the trp promoter and ribosome binding site the pPAIST-7 was generated following standard ligation.

[0613] To generate the pPAIST7HS prokaryotic expression vector (Shubeita et al. (1990) J. Biol. Chem., 265: 18379-18385), the pPAIST7 was partially digested with HindIII to linearize the plasmid, blunt-ended with the Klenow fragment of E. coli DNA polymerase I and ligated to eliminate the upstream HindIII site. Deletion of sequences in pPAIST7 downstream of the PAI-1 coding sequences between the HindIII and SalI sites and elimination of the SalI site was accomplished by sequential partial SalI digestion, complete HindIII digestion, blunt-ending with the Klenow fragment of E. coli DNA polymerase I, and ligation.

[0614] Mutagenesis reaction was carried out using the Multi site mutagenesis kit (Stratagene) following conditions specified by the supplier. Mutagenesis of amino acids in wild-type PAI-1 at positions P4-P1′ in the reactive center loop corresponding to amino acids VSARM (SEQ ID NO:378) were made. A mutant PAI-1 was made (PAI-1/RRAR) containing replacement of the wild-type amino acid sequence VSARM with RRARM (SEQ ID NO:379) sequences in the PAI-1 reactive center loop from the P4 to P1′ positions. The sequence of the RRARM mutagenic primer was: 5′-CCACAGCTGTCATAAGGAGGGCCAGAATGGCCCCCGAGGAGATC-3′ (SEQ ID NO:380). A second mutant PAI-1 was made (PAI-1/69) containing replacement of the wild-type amino acid sequence VSARM with PFGRS (SEQ ID NO:389) sequences in the PAI-1 reactive center loop from the P4 to P1′ positions. The sequence for the PFGRS mutagenic primer was: 5′CCACAGCTGTCATACCCTTCGGCAGAAGCGCCCCCGAGGAGATC-3′ (SEQ ID NO:390). Following mutagenesis, the DNA isolated from the transformants was fully sequenced to confirm the presence of desired mutations and the absence of any additional mutations.

[0615] The mutants PAI-1/RRAR and PAI-1/69 were expressed as fusion proteins utilizing N-terminal poly histidine residues present in the pPAIST7HS vector. The expression and purification of mutant PAI-1s (i.e. PAI-1/RRAR and PAI-1/69) were based on methods as described in Ke et al. (J. Biol. Chem., 272: 16603-16609 (1997)). Expression of wild type and mutated variants of PAI-1 was accomplished by transforming 0.1 μg DNA of pPAIST7HS vector encoding mutant PAI-1 into the E. coli strain BL21[DE3]pLys^{s} (Novagen), which synthesizes T7 RNA polymerase in the presence of isopropyl-1-thio-β-D-galactopyranoside. Bacterial cultures were grown at 37° C. with vigorous shaking to an absorbance A₅₉₅ of 1.1-1.3, and isopropyl-1-thio-β-D-galactopyranoside was added to a final concentration of 1 mM to induce the synthesis of T7 RNA polymerase and the production of PAI-1 proteins. Cultures were grown for an additional 1-2 h at 37° C. and then shifted to 30° C. for 2-6 h. Cells were pelleted by centrifugation at 8000×g for 20 min at 4° C. and resuspended in 40 ml of cold start buffer (20 mM sodium acetate, 200 mM NaCl, and 0.01% Tween 20, pH 5.6). The cell suspension was disrupted in a French pressure cell (Aminco), and cellular debris was removed by ultracentrifugation for 25 min at 32,000×g.

[0616] Purification of soluble, active mutant PAI-1 was performed by injecting the lysate of E. coli containing soluble form of PAI-1/RRAR or PAI-1/69 onto an XK-26 column (Pharmacia Biotech Inc) packed with CM-50 Sephadex (Pharmacia, see e.g., Sancho et al. (1994) Eur. J. Biochem. 224, 125-134). The column was washed with 5 column volumes of start buffer (20 mM sodium acetate, 200 mM NaCl, and 0.01% Tween 20, pH 5.6), and PAI-1 proteins were eluted using a 0.2-1.8 M linear gradient of NaCl in the same buffer. Peak fractions were collected, pooled, and concentrated using a centriplus 30 concentrator (Amicon). The concentrated fractions were used for activity measurement.

### B. PAI-1 ACTIVITY MEASUREMENTS

### 1. Active Site Titration Against Standard Trypsin

[0617] Active concentration of PAI-1/RRAR and PAI-1/69 was determined by active site titration against standard trypsin as described by Olson et al. (J. Biol. Chem., 270: 30007 (1995)). Briefly, sequential additions of concentrated inhibitor (0.5-6.0 μM) were made to solutions of 1 μM β-trypsin (Sigma) and 10 μM p-aminobenzamidine probe (Sigma). Binding was monitored from the decrease in fluorescence accompanying the displacement of the bound probe from the enzyme active site as the inhibitor bound. After addition of each concentrated inhibitor a 1-2 minute equilibration time was allowed before assessment of fluorescence changes at excitation and emission wavelengths of 325 nm and 345 nm, respectively, to maximize the difference between bound and free probe fluorescence. Control titrations of just the probe with the inhibitor in the absence of the trypsin enzyme were performed to correct for background fluorescence. Inhibitor-enzyme titrations were fit by linear regression analysis.

### 2. Titration of Standardized t-PA Preparations

[0618] Mutant PAI-1s were also titrated against standardized t-PA preparations to assess activity. The inhibitory activity of wild-type PAI-1 or mutant PAI-1 was measured by a direct chromogenic assay using tPA (American Diagnostics, Inc, 100 U/μg) and the chromogenic tPA substrate H-D-Ile-Pro-Arg-para-nitroaniline substrate (S-2288, Chromogenix). Serially diluted PAI-1 (0.1-4.0 μg) were incubated with tPA in a microtiter plate for a fixed time (typically, 20-60 minutes) at room temperature and the residual activity of tPA was measured by the addition of the chromogenic substrate S-2288 to a final concentration of 0.5 mM. The residual activity of t-PA following incubation with increasing concentrations of inhibitor was assessed by measuring the absorbance at 405 nm.

### Example 2

### Construction of Phage Display Libraries of u-PA Variants

### A. CLONING OF WILD-TYPE u-PA INTO PHAGEMID

[0619] To demonstrate functional display of the protease domain of u-PA on phage, high fidelity PCR was performed using primers 496 and 497, Pfu DNA polymerase and pCMV4 plasmid (SEQ ID NO:373) containing c-DNA of full length u-PA gene (SEQ ID NO:474) as a template. The primers used in the PCR amplification were as follows: 496, 5′-ACGTGGCCCAGGCGGCCTTTCAGTGTGGCCAAAAG-3′ (SEQ ID NO:374); 497, 5′-TCCTGGCCGGCCTGGCCGAGCAGGCCATTCTC-3′ (SEQ ID NO:375). Both the primers carry restriction sites (underlined) for SfiI enzyme at the 5′ terminus. After purification and SfiI digestion, the PCR product was ligated to SfiI digested phagemid vector, pComb3H (SEQ ID NO:376) (Andris-Widhopf et al. (2000) J Immunol Methods, 28: 159-81). The phagemid was used for monovalent display of wild type or mutant u-PA (see below). This construct contains sequences encoding the C-terminal region of the gIIIp gene of fd phage. The presence of two SfiI restriction sites in the vector with two different recognition sequences was exploited for designing the above-mentioned primers. The PCR products amplified using primers 496 and 497 enabled directional cloning of the u-PA protease domain cDNA (SEQ ID NO:475) into the phagemid (see below for ligation conditions). In the final construct, the PCR products containing sequences of the u-PA protease domain were cloned in the middle of OmpA and gIIIp sequences to display wild-type or mutant uPA as an N-terminal gIIIp fusion.

### B. CONSTRUCTION OF MUTANT u-PA AND PHAGE DISPLAY LIBRARIES OF MUTANT u-PA

[0620] To construct u-PA phage display libraries, error-prone PCR amplification was carried out using the pCMV4/u-PA plasmid containing cDNA of the uPA gene as template, as set forth above, for 25 cycles in 100 μl reaction mixtures using reagents supplied with the PCR Diversify mutagenesis Kit (Clontech). Appropriate PCR conditions were followed to set up three different PCR reactions to amplify only the protease domain of the uPA gene (SEQ ID NO:475) using primers 496 and 497 from above by varying the amounts of manganese (MN2+) or dGTP as described by the manufacturer, to achieve 0.2, 0.5, or 0.9% of mutation rate incorporation into the cDNA. The amplified PCR products (805 bp, SEQ ID NO:475) were purified using a PCR purification kit (Qiagen) followed by SfiI enzyme digestion. The SfiI digested PCR products from each mutatgenesis reaction were used to generate three different libraries.

[0621] For library construction, the pComb3H vector (SEQ ID NO:376) was digested with SfiI enzyme and the larger DNA fragment from this reaction was gel purified using a “Gel slice kit” (Qiagen). Three separate ligation reactions were carried out to construct three libraries with PCR products containing 0.2, 0.5 and 0.9% mutation rates. At least 1 μg of the gel purified vector was mixed with SfiI digested PCR products (1:2 ratio) and the ligation mixtures were incubated overnight at 18° C. Next, the ligation mixtures were purified using Qiagen mini elute kit (Qiagen) and the DNA was finally eluted into 60 μl of Milli Q purified water. The purified DNA was electroporated into 400 μl of E. coli XL Blue1 electroporation competent cells (Stratagene) using gene pulser (Bio Rad). The cells were then transferred to 10 ml of SOC medium (Invitrogen) and incubated at 37° C. in a shaker for 1 hr followed by plating on large LB agar plates (245 mm×245 mm) supplemented with carbenicillin (75 μg/mL). After overnight incubation of plates at 30° C. the transformants were scraped using a cell scraper and the resulting cultures were grown in 2×YT medium supplemented with carbenicillin (75 μg/ml) at 37° C. shaking for 2 hours. The cultures were infected with helper phage (VCS M13) at an MOI (multiplicity of infection) of 5 for amplification of the libraries. After 1 hour of growth at 37° C. shaking, the cultures were supplemented with kanamycin to final concentrations of 3 μg/mL and grown overnight at 30° C. with shaking. The cells were harvested and the phage particles present in the supernatant were precipitated using a PEG-NaCl solution. Simultaneously, to calculate the diversity of each library, an aliquot of the electroporated cells were plated on LB agar plates supplemented with carbenicillin (100 μg/ml) and after overnight incubation at 37° C. the colonies were counted. The same methods were used to generate successive generations of u-PA phage display libraries for further improvement of identified u-PA variants against PAI-1/RRAR inhibitor. The DNA of u-PA variants identified from the previous libraries was used as template for construction of next generation libraries.

[0622] The catalytic efficiencies of wild type or u-PA phage libraries generated using random mutagenesis were analyzed using the indirect plasminogen activation assay. Briefly, 5 μl of u-PA phage (typically ˜5×10¹² cfu), 0.2 μM Lys-plasminogen (American Diagnostic) and 0.62 mM Spectrozyme PL (American Diagnostica) were present in a total volume of 100 μl. Assays were performed in microtiter plates, and the optical density at 405 nm was read every 30 seconds for 1 h in a Molecular Devices Thermomax. Reactions were performed at 37° C. Inhibition of u-PA or u-PA variant phage also was assessed. Briefly, 5 μl of u-PA phages (typically ˜5×10¹² cfu) were mixed with wt-PAI-1 (0.1 μM) or mutant PAI-1/RRAR inhibitor (1.0 μM) and incubated for 30 min at room temperature followed by addition of 0.62 mM Spectrozyme PL, 0.2 μM Lys-plasminogen (American Diagnostics, Inc.). The assays were read as mentioned above.

### Example 3

### Selection of Variant u-PA from u-PA Phage Libraries Against Mutant Inhibitor

### A. SELECTION OF u-PA PHAGE/MUTANT PAI-1 COMPLEXES

[0623] Mutant PAI-1/RRAR inhibitor or PAI-1/69 were used as the “bait substrate” in the panning experiment to isolate altered u-PA phage/s with improved reactivity towards the mutant substrate sequence from large, combinatorial u-PA phage display libraries described in Example 2 above. In brief, 5 μl (˜2×10¹² to ˜1×10¹³) u-PA phage, containing an equal representation of u-PA phage from all three u-PA phage libraries (0.2, 0.5 and 0.9% mutagenesis frequency), was mixed with 5 μl bait substrate (from 0.1 to 1.0 μM PAI-1/RRAR or PAI-1/69) and 10 μl 10× indirect buffer pH 7.4 (0.5 M Tris, 1.0 M NaCl, 10 mM EDTA, 0.1% Tween 80) in a total volume of 100 μl (i.e. reaction contained 80 μl H₂O). The reaction was incubated for varying times at room temperature (typically 1 hour, however, incubation time was adjusted to control the stringency of the solution).

[0624] The u-PA phage-PAI-1 inhibitor complexes were captured using CuSO₄ activated sepharose. Pre-activation of the chelating sepharose (200 μl; Pharmacia) was accomplished by treatment with CuSO₄ (100 mM). The CuSO₄ activated sepharose was blocked with 0.5% BSA in PBS buffer for 1 hour at room temperature. 100 μl of BSA blocked sepharose beads was added to 100 μl of the above panning mixture reaction in the presence of 800 μl of binding buffer (0.5 M NaCl, 20 mM Tris, 20 mM immidozole, pH7.4) to capture the His-tagged PAI-1 inhibitor-u-PA phage complexes. The incubation was continued for another 1 hour at room temperature. Next, the panning mixture was centrifuged for 1 min at 2000 rpm and the sepharose beads containing bound u-PA phage-PAI-1 inhibitor complexes were washed with 1 ml of binding buffer to remove unbound phages. The washing step was repeated 5-10 times and the beads containing bound complexes were transferred to new tubes after each wash to avoid any potential “carry over” of non-specific phages.

[0625] The bound u-PA phage-PAI-1/RRAR complexes were eluted in 100 μl of elution buffer (0.5M EDTA). A 95 μl aliquot of the eluted phages was used to infect 1 ml of XL-1 Blue E. coli cells (0.6 OD) to calculate the output of the libraries (indicating the number of phage obtained after selection). The infected bacteria were plated on large plates (245 mm×245 mm) containing carbenicillin (75 μg/ml) to generate a library for the next round of selection. Finally, the remaining output library (i.e. selected phage) was used to prepare individual phage clones for screening and/or generating a new library for the next round of selection. The concentrations of bait substrate used in the selection and times of incubation of the library with the bait substrate were adjusted according to the desired stringency level. For example, conditions could be chosen such that <1%, 2%, 5%, 10%, or greater than 10% of the u-PA activity of the library was inhibited by the “bait PAI-1” containing the bait substrate sequence. Typically, the first round of selection was carried out using higher (e.g., 0.5 μM) concentrations of bait PAI-1 and for successive rounds of selection the bait serpin concentration and incubation time with libraries were reduced. In addition, multiple stringencies can be used in parallel at each round of selection. Based on the quality of the output (e.g., signal to noise ratio of the phage output in paired +/−bait serpin selections (see description below)), and the quality of the resulting “hits” based on functional analysis, the phage output from one or more of these selections can be carried forward into the next round(s) of selection.

[0626] In parallel, control experiments were performed using the above-mentioned conditions for selection of phage from the u-PA library without bait and the phage from this control experiment was compared with the output of the library selections in the presence of bait serpin substrate. The cfu from the output of library selected in the presence of bait was normally in the range of 10⁴ to 10⁵ higher than the output obtained from the control selection. If higher background was observed with the control selection, the panning was repeated using more stringent conditions such as reducing incubation times, increasing concentrations of reactants (library, bait or beads) and increasing number and time of washing the selected phage bound to chelating sepharose (up to a factor of 10 or more).

### B. SCREENING OF u-PA PHAGES WITH INCREASED REACTIVITY AND CATALYTIC EFFICIENCY TOWARDS NEW SUBSTRATE SEQUENCES

[0627] An aliquot of eluted u-PA phages (5 μl) was mixed with XL-1Blue E. coli cells (100 μl) for infection and incubated at 37° C. for 1 hr. The infected E. coli cells were then plated on LB agar plates supplemented with carbenicillin (100 μg/ml). After overnight incubation at 37° C., individual colonies were picked for phage preparations. The cells were grown in 2 ml of 2×YT supplemented with carbenicillin (100 μg/ml) and tetracycline (10 μg/ml) and phage preparation was performed as described (Sambrook, J et al (1989) Molecular Cloning, A laboratory manual, Cold spring Harbor laboratory). The identified phage were tested in the following assays to assess activity. The individual phage preparations were used in the indirect plasminogen activation assay to identify active phages, and the active phage preparations were used for inhibition assays.

### 1. Indirect Plasminogen Activation Assay

[0628] The individual phage preparations were used in the indirect plasminogen activation assay to identify active u-PA phages. Briefly, 5 μl of u-PA phage (typically ˜5×10¹² cfu), 0.2 μM Lys-plasminogen (American Diagnostic) and 0.62 mM Spectrozyme PL (American Diagnostica) were present in a total volume of 100 μl. Assays were performed in microtiter plates, and the optical density at 405 nm was read every 30 seconds for 1 h in a Molecular Devices Thermomax. Reactions were performed at 37° C.

### 2. Inhibition of u-PA Phage by Mutant PAI-1/RRAR

[0629] The phage that were identified as active in the indirect plasminogen activity assay were further tested for inhibition by mutant PAI-1/RRAR. Briefly, for the inhibition assays, 5 μl of active u-PA phages (typically ˜5×10¹² cfu) were added in duplicate wells of a microtiter plate followed by addition of a fixed concentration of mutant PAI-1 (e.g., 1.0 μM) to one well and phosphate buffered saline (PBS) to the duplicate well. After mixing, the reaction was allowed to continue for a fixed time (e.g., 30 min) at room temperature followed by addition of 0.62 mM Spectrozyme PL, 0.2 μM Lys-plasminogen (American Diagnostics, Inc.). For control experiments, wild-type u-PA phage was assessed under the same conditions. The plates were read at 405 nm in a spectrophotometer for 2 hrs. The selected u-PA phages that exhibited improved sensitivity for PAI-1/RRAR or PAI-1/69 as compared with wild-type u-PA phage were selected for further analysis and subjected to DNA sequencing.

### 3. Peptide Substrate Screening

[0630] In addition, to identify variants of u-PA phage with improved catalytic efficiency the individual phage clones were screened against an Ac-RRAR-AMC substrate. For the assay, a fixed volume of phage supernatants (e.g., 35 μl) was mixed with 75 μM Ac-RRAR-AMC substrate in IX indirect assay buffer (50 mM Tris, 100 mM NaCl, 1 mM EDTA, 0.01% Tween 80) in a total volume of 100 μl. The assay was carried out in 96-well or 384-well black assay plates (Corning) and read at 380-450 nm for 2 hrs in spectrophotometer (Molecular Devices) reader.

[0631] To confirm their improvement, the positive u-PA phages identified after inhibitor and peptide substrate screenings were re-screened using the assays set forth above.

### C. IDENTIFICATION OF SELECTED u-PA MUTANTS AND OPTIMIZATION OF IDENTIFIED MUTANTS

[0632] Positive phage clones were mixed with XL-1Blue E. Coli cells for infection as mentioned above and the cultures were grown overnight with shaking at 37° C. Plasmid DNA was purified from the overnight culture using a plasmid preparation kit (Qiagen). The DNA was sent for custom sequencing using the following primers: 535-5′-CAGCTATCGCGATTGCAG-3′ (SEQ ID NO:381); 5542-5′GTGCGCAGCCATCCCGG-3′ (SEQ ID NO:382). Amino acid residues altered in the mutant u-PA genes were identified after analyzing the sequencing data.

[0633] Table 10 below sets forth variants of u-PA identified from selection of variant u-PA from u-PA phage libraries against a PAI-1/RRAR mutant inhibitor. The mutations set forth in Table 10 below are with chymotrypsin numbering. The numbers in parentheses indicate the number of times the mutants were identified in the phage selection method. Based on results from activity assays, the best variants of u-PA phages are highlighted by underline. Amino acid sequences of a mature u-PA preproprotein (SEQ ID NO:433) containing the designated mutations are set forth in any of SEQ ID NOS: 434-445.

TABLE 10

| u-PA Phage | | Mutation site/s | | SEQ |
|---|---|---|---|---|
| libraries Vs | Mutant | (Chymotrypsin | | ID |
| PSI-1/RRAR | name | Number) | Amino acid/s modified | NO: |
| Selection I | AR73 (2) | 30 | Phe-Ileu | 434 |
| | AR81 | 73, 89 | Leu-Ala, Ileu-Val | 435 |
| Selection | AR1 | 73 | Leu-Pro | 436 |
| II &III | AR3 | 217 | Arg-Cys | 437 |
| | AR4 (3) | 155 | Leu-Pro | 438 |
| | AR7 | 75, 89, 138 | Ser-Pro, Ileu-Val, Ileu-Thr | 439 |
| | AR32 | 137 | Glu-Gly | 440 |
| | AR36 | 72, 155 | Arg-Gly, Leu-Pro | 441 |
| | AR37 | 133 | Gly-Asp | 442 |
| | AR66 | 160 | Val-Ala | 443 |
| | AR24 | 38 | Val-Asp | 444 |
| | AR85 | 132, 160 | Phe-Leu, Val-Ala | 445 |

[0634] Amino acid residues altered in the mutant u-PA gene exhibiting increased sensitivity against PAI-1/69 inhibitor following selection against the PAI-1/69 inhibitor were identified after analyzing the sequencing data as set forth above. The mutants identified from the first generation protease phage display library (I) are set forth below in Table 11. Subsequent generations of protease phage display libraries were created using the method as set forth above in Example 2B using the PCR Diversify mutagenesis kit and primers 496 and 497. For the generation II phage display library, the u-PA mutant u-PA/Ic containing a mutation corresponding to F30V based on chymotrypsin numbering was used as a template for the mutagenesis reaction. The mutants identified from the second generation protease phage display library (II) are set forth in the Table 11 below. For the generation III phage display library, the u-PA mutant u-PA-IIb or u-PA-IIb mutant containing mutations corresponding to F30V/Y61(A)H or F30V/K82E, respectively, based on chymotrypsin numbering were used as templates for the mutagenesis reaction. The mutants identified from the third generation protease phage display library (III) are set forth in Table 11 below. For the generation IV phage display library, the u-PA mutant u-PA/IIIa containing mutations corresponding to F30V/K82E/V159A based on chymotrypsin numbering was used as a template for the mutagenesis reaction. The mutants identified from the fourth generation protease phage display library (IV) are set forth in Table 11 below. The numbers in parentheses indicate the number of times u-PA phage were selected for that had the same mutation. The underline indicates the new mutations acquired by the mutant. Amino acid sequences of a mature u-PA preproprotein (SEQ ID NO:433) containing the designated mutations are set forth in any of SEQ ID NOS: 460-472.

TABLE 11

| | | | | SEQ |
|---|---|---|---|---|
| Phage | Mutant | | | ID |
| libraries | name | Mutation sites | Amino acids modified | NO: |
| I | u-PA/Ia | 21 | Phe-Val | 460 |
| | u-PA/Ib | 24 | Ile-Leu | 461 |
| | u-PA/Ic (2) | 30 | Phe-Val | 462 |
| | u-PA/Id | 30 | Phe-Leu | 463 |
| II | u-PA/IIa | 30, 61(A) | Tyr-His | 464 |
| | u-PA/IIb | 30, 82 | Lys-Glu | 465 |
| | u-PA/IIc | 30, 156 | Lys-Thr | 466 |
| III | u-PA/IIIa (8) | 30, 82, 159 | Val-Ala | 467 |
| | u-PA/IIIb | 30, 82, 39, 159 | Thr-Ala, Val-Ala | 468 |
| | u-PA/IIIc | 30, 82, 158, 159 | Thr-Ala, Val-Ala | 469 |
| | u-PA/IIId (2) | 30, 61A, 92 | Lys-Glu | 470 |
| IV | u-PA/IVa | 30, 82, 159, 80, 89, 187 | Glu-Gly, Ile-Val, Lys-Glu | 471 |
| | u-PA/IVb | 30, 82, 159, 80, 84, 89, 187 | Glu-Gly, Glu-Lys, Ile-Val, Lys-Glu | 472 |

### 1. Optimization and Recombination of Amino Acid Resides 30 and 155 in Focused Phage Display Libraries against PAI-1/RRAR Inhibitor

[0635] To enrich the sensitivity of u-PA variants against the PAI-1/RRAR inhibitor, amino acid 30 and amino acid 155 based on chymotrypsin numbering (identified as hot spots in the first selections as set forth in Table 10 above) were targeted for randomization and recombination using the following primers, respectively: TC30-5′GCCCTGGNNSGCGGCCATC-3′ (SEQ ID NO:383) TC155-5′GGAGCAGNNSAAAATGACTG-3′ (SEQ ID NO:384)

[0636] Mutagenesis was performed using the Quick Change multi site-directed mutagenesis kit (Stratagene) following conditions described by the manufacturer. In brief, after phosphorylation of the primers using T4 polynucleotide kinase (New England Biolabs) following conditions described by the manufacturer, three different reactions were performed for randomization of residues 30 and 155: 1) 30 individually; 2) 155 individually; and 30 plus 155 together. The DNA construct, pComb3H/u-PA variant (pARF 81), carrying mutations at residues L73A and I89V as compared to the corresponding wild type u-PA protease domain sequences, was used as a template in the mutagenesis reaction using primers TC30 (SEQ ID NO:383) and TC155 (SEQ ID NO: 384) individually for randomization of positions 30 and 155 respectively. In another reaction, these two primers were used to randomize positions 30 and 155 together in the pARF 81 variant DNA. Mutagenesis reaction was carried out using the Multi site mutagenesis kit (Stratagene) following conditions specified by the supplier. After mutagenesis, the reaction products were transformed into XL-1 Blue E. coli cells for library construction (See Example 2 above). The amplified u-PA phage libraries were used for selection of improved variants of u-PA as set forth in Example 3A and 3B above.

[0637] Table 12 below sets forth variants of u-PA identified from selection against a PAI-1/RRAR mutant inhibitor of variant u-PA from focused u-PA phage libraries where all variants had background mutations at amino acid residues L73A and I89V based on chymotrypsin numbering. The mutations set forth in Table 12 below are with chymotrypsin numbering. The numbers in parentheses indicate the number of times the mutants were identified in the phage selection method. Based on results from activity assays, the best variants of u-PA phages are highlighted by underline. Amino acid sequences of a mature u-PA preproprotein (SEQ ID NO:433) containing the designated mutations are set forth in any of SEQ ID NOS: 446-459.

TABLE 12

| Focused | | | | |
|---|---|---|---|---|
| u-PA libraries | | | | SEQ |
| Vs | Mutant | | | ID |
| PAI-1/RRAR | Name | 30 (Phe) | 155 (Leu) | NO |
| Selection I | ARF2 | Thr | — | 446 |
| &II | ARF6 | Leu | — | 447 |
| | ARF11 | Val | — | 448 |
| | ARF17 | Gly | — | 449 |
| | ARF16 | Leu | — | 450 |
| | ARF33 | — | Val | 451 |
| | ARF35 | Met | — | 452 |
| | ARF36 | — | Met | 453 |
| | ARF37 | Met | — | 454 |
| | ARF43 | Leu | — | 455 |
| | ARF47 | Val | — | 456 |
| | ARF48 | Leu | Met | 457 |
| | ARF103 | Leu | — | 458 |
| | ARF115 | Gly | Met | 459 |

### Example 4

### Expression of Modified u-PA Enzymes by Transient Transfection of COS Cells

[0638] For the expression of variant u-PA enzymes in a mammalian expression system, the positive clones identified from phage display results were used as a template (pComb3H carrying mutant u-PA protease domain sequences) for PCR amplification of cDNA encoding the selected u-PA variant gene. Overlap extension PCR (Ho, S et al (1989) Gene 77, 51-59) was carried out using the following primers. 717-5′-TTTCAGTGTGGCCAAAAG-3′ (SEQ ID NO:385); 718, 5′-CAGAGTCTTTTGGCCACA-3′ (SEQ ID NO:386); 850, 5′-GGGGTACCGCCACCATGAGAGCCCTGCTGGCGCGC-3′ (SEQ ID NO:387); 851, 5′-GCTCTAGATCATCAGAGGGCCAGGCCATTCTCT-3′ (SEQ ID NO:388). The primers 850 and 851 carry sequences for KpnI and XbaI restriction enzymes (underlined) respectively.

[0639] PCR was performed in two steps to accomplish full-length amplification of mutated cDNA u-PA gene as described below. In the first step, PCR was carried out in a 100 μl reaction to amplify a 500 bp product (corresponding to the EGF and Kringle domains of u-PA) using Pfu DNA polymerase, primers 850, 718 and pCMV4 containing the full-length uPA gene (SEQ ID NO:474) as template. Similarly, another PCR was carried out to amplify the mutant u-PA protease domain (800 bp, i.e. corresponding to mutant sequences as compared to the wild-type sequence set forth in SEQ ID NO:475) using primers 851 and 717 with the appropriate mutant u-PA-pComb3H as template. These two PCR products were gel purified and used in the next round of PCR amplification. In the second step, the gel purified PCR products (5 μl each) were used as templates in 100 μl reaction mixture with primers 850 and 851. The primers 717 and 718 have overlapping complementary sequences that allowed the amplification of the full-length u-PA cDNA (1.3 kb) in the second step PCR. The PCR product was purified using a PCR purification kit (Qiagen) and then digested with KpnI and XbaI restriction enzymes. After purification using QIAquick columns (Qiagen), the full-length u-PA gene was ligated with the pCMV4 mammalian expression vector (SEQ ID NO:373) that had been previously digested with KpnI and XbaI. The ligation mixture was electroporated into E. coli XL-1 Blue cells and plated on LB plates supplemented with carbenicillin (100 μg/ml). After overnight incubation of plates at 37° C., individual colonies were picked up and grown in 2 ml LB medium for plasmid purification. The plasmids were used for sequencing the entire u-PA gene using the following sequencing primers. UPAF1-5′ATGAGAGCCCTGCTGGCGCGCC-3′ (SEQ ID NO:476) and UPAF2-5′GGAAAAGAGAATTCTACCG-3′ (SEQ ID NO:477).

[0640] Mutant u-PA clones with the correct mutations, without any additional mutation(s), were prepared in large quantities using Midi Plasmid preparation kit (Qiagen) and used for electroporation into COS-1 cells using a Bio-Rad Gene Pulser. 20 μg of cDNA, 100 μg of carrier DNA, and approximately 10⁷ COS-1 cells were placed into a 0.4-cm cuvette, and electroporation was performed at 320 V, 960 microfarads, and Ω=∞ (Tachias et al. (1995) J. Biol. Chem., 270: 18319-18322). Following electroporation, the transfected cells were incubated overnight at 37° C. in DMEM medium (Irvine Scientific) containing 10% fetal calf serum and 5 mM sodium butyrate. Cells were then washed with serum free medium and incubated in DMEM for 48 h at 37° C. After incubation with serum-free media, conditioned media was collected and used for further characterization.

### Example 5

### Characterization of Purified Mutant u-PAs

### A. MEASUREMENT OF ENZYME CONCENTRATION

[0641] The single-chain form of the mutant u-PA enzymes in conditioned media was converted into the corresponding two-chain enzyme by treatment with plasmin-sepharose (Calbiochem). The concentration of active u-PA in these media was measured by active site titration with a standard PAI-1 inhibitor preparation that had been previously titrated against a trypsin primary standard as described in Example 1 above. Total enzyme concentrations were measured by enzyme-linked immunosorbent assay following the protocols of laboratory manual, Harlow et al (1998) Using Antibodies, Cold Spring Harbor Laboratory. The ratio of these concentrations yields the fraction of u-PA variant that is active in each media.

### B. DIRECT CHROMOGENIC ASSAY OF u-PA

[0642] Direct assays of u-PA activity utilized the substrate carbobenzoxy-L-γ-glutamyl (α-t-butoxy)-glycyl-arginine-p-nitroanilide monoacetate salt (Cbo-L-(γ)-Glu(α-t-βuO)-Gly-Arg-pNA AcOH; Spectrozyme® uPA, American diagnostica) (Madison et al. (1995) J. Biol. Chem., 270:7558-7562). Enzyme activity was determined by measuring the increase in absorbance of the free (pNA) generated per unit time at an absorbance of 405 nm. Kinetic assays were performed over time using enzyme concentrations between 6 and 8 nM. The concentration of Spectrazyme® uPA was varied from 25 to 150 μM in assays of two-chain u-pA, and from 25 to 200 μM in assays of the protease domain of u-PA. Reactions were performed in 96-well microtiter plates and reaction rates were assessed by measurement of absorbance at 405 nm every 30 seconds for up to 2 hours using a Spectromax M2 or M5 plate reader (Molecular Devices). The kinetic constants k_{cat}, Kₘ, and k_{cat}/Kₘ (specificity constant) were calculated by graphing the inverse of the substrate concentration versus the inverse of the velocity of absorbance at OD₄₀₅, and fitting to the Lineweaver-Burk equation (1/velocity=(Kₘ/Vₘₐₓ)(1/[S])+1/Vₘₐₓ; where Vₘₐₓ=[E]*k_{cat}).

[0643] Table 13 below set forth the results of kinetic analysis of mutants of u-PA, identified as exhibiting increased sensitivity against PAI-1/69 inhibitor, in a direct assay of u-PA enzyme activity. The results show that each of the mutant u-PAs identified have a decreased enzyme activity as compared to wild-type u-PA as determined from the measurement of the specificity constant for cleavage (k_{cat}/Kₘ) of the Spectrozyme® uPA substrate. In the Table, the variants tested are those identified in Table 11 above following selection from successive generations (I to IV) of u-PA phage display libraries.

TABLE 13

| | | | | Mutant/ |
|---|---|---|---|---|
| | Kₘ | | | Wt |
| u-PA mutants | (mM) | k_{cat}^{(s-1)} | k_{cat}/Kₘ^{(M-1 s-1)} | u-PA |
| u-PA/Ic (30) | 0.745 | 22.3 | 2.9 × 10⁵ | 0.30 |
| u-PA/IIb (30, 82) | 0.299 | 11 | 3.6 × 10⁵ | 0.38 |
| u-PA/IIIa (30, 82, 159) | 0.239 | 11.6 | 4.8 × 10⁵ | 0.50 |
| u-PA/IIIb (30, 39, 82, 159) | 0.212 | 9.6 | 4.5 × 10⁵ | 0.47 |
| u-PA/IVa (30, 80, 82, | 0.177 | 10 | 5.6 × 10⁵ | 0.58 |
| 89, 159, 187) | | | | |
| u-PA/IVb (30, 80, 82, 84, | 0.321 | 11 | 3.4 × 10⁵ | 0.35 |
| 89, 159, 187) | | | | |
| Wild type u-PA | 0.174 | 16.6 | 9.5 × 10⁵ | 1.0 |

### C. KINETIC ANALYSIS OF u-PA VARIANTS USING FLUOROGENIC SUBSTRATE

[0644] Direct assays for measuring activity of the u-PA variants against the RRAR target substrate sequence were performed utilizing an Ac-RRAR-AMC substrate. The use of 7-amino-4-methylcoumarin (AMC) fluorogenic peptide substrate is a routine method for the determination of protease specificity (Zimmerman et al. (1977) Anal Biochem, 78:47-51; Harris et al. (2000) PNAS, 97:7754-7759). Specific cleavage of the anilide bond frees the fluorogenic AMC leaving group, providing an efficient means to determine the cleavage rates for individual substrates. The substrates were serially diluted from 0.05 to 12.0 mM and incubated in the presence of protease (9-25 nM) in a Costar 96-well black half-area assay plate. The fluorescence from the free AMC leaving group was measured in a fluorescence spectrophotometer (Molecular Devices Gemini XPS) at an excitation wavelength (380 nm) and emission wavelength (450 nm) with reference to an AMC standard. The rate of increase in fluorescence was measured over 30 minutes with readings taken at 30 second intervals. The kinetic constants k_{cat}, Kₘ, and k_{cat}/Kₘ (specificity constant) were calculated by graphing the inverse of the substrate concentration versus the inverse of the velocity of substrate cleavage, and fitting to the Lineweaver-Burk equation (1/velocity=(Kₘ/Vₘₐₓ)(1/[S])+1/Vₘₐₓ; where Vₘₐₓ=[E]*k_{cat}).

[0645] Table 14 below sets forth the results of the kinetic analysis of the u-PA variants ARF2 and ARF36 against the Ac-RRAR-AMC substrate. The results show that the specificity constant for the RRAR substrate for the selected u-PA protease variants are increased about or more than 10-fold as compared to wild-type u-PA.

TABLE 14

| | | | Improvement of K_{cat}/Kₘ |
|---|---|---|---|
| Mutants | Kₘ (μM) | K_{cat}/Kₘ (M⁻¹ s⁻¹) | mutant/Wt u-PA |
| u-PA/ARF2 | 546 | 434 | 11.7 |
| u-PA/ARF36 | 614 | 357 | 9.6 |
| Wt u-PA | 381 | 37 | 1.0 |

### D. KINETIC ANALYSIS OF PLASMINOGEN ACTIVATION USING AN INDIRECT CHROMOGENIC ASSAY

[0646] An indirect chromogenic assay was performed to determine the activities of the wild-type and mutant u-PA produced as purified protein preparations (Madison et al. (1989) Nature, 339: 721-724; Madison et al. (1990) J. Biol. Chem., 265: 21423-21426). In this assay, free p-nitroaniline is released from the chromogenic substrate Spectrozyme PL (H-D-norleucylhexahydrotyrosyl-lysine-p-nitroanilide diacetate salt, American Diagnostics, Inc.) by the action of plasmin generated by the action of u-PA on plasminogen. The release of free p-nitroaniline was measured spectrophotometrically at OD₄₀₅ nm.

[0647] For the assay, 100 μl reaction mixtures containing 0.25-1 ng of the uPA enzymes to be tested, 0.62 mM Spectrozyme PL, 0.2 μM Lys-plasminogen (American Diagnostics, Inc.), were combined in a buffer containing 50 mM Tris-HCL (pH 7.5), 0.1 M NaCl, 1.0 mM EDTA and 0.01% (v/v) Tween 80. The reaction was incubated at 37° C. in 96-well, flat-bottomed microtiter plates (Costar, Inc.) and the optical density at 405 nm (OD₄₀₅) was read every 30 s for 1 h in a Molecular Devices Thermomax. The kinetic constants k_{cat}, Kₘ, and k_{cat}/Kₘ (specificity constant) were calculated as described earlier (Madison, E. L (1989) Nature 339, 721-724).

[0648] Table 15 below sets forth the results of kinetic analysis of mutants of u-PA, identified as exhibiting increased sensitivity against PAI-1/69 inhibitor, in an indirect assay of u-PA enzyme activity. The results show that each of the mutant u-PAs identified have a decreased enzyme activity as compared to wild-type u-PA as determined from the indirect measurement of the specificity constant for cleavage (k_{cat}/Kₘ) of cleavage of the Spectrozyme® PL substrate. In the Table, the variants tested are those identified in Table 11 above following selection from successive generations (I to IV) of u-PA phage display libraries.

TABLE 15

| | Kₘ | | | |
|---|---|---|---|---|
| u-PA mutants | (μM) | k_{cat}^{(s-1)} | k_{cat}/Kₘ^{(M-1 s-1)} | Mutant/Wt u-PA |
| u-PA/Ic | 9.01 | 24.7 | 2.7 × 10⁶ | 0.24 |
| u-PA/IIb | 8.6 | 22.6 | 2.6 × 10⁶ | 0.23 |
| u-PA/IIIa | 6.31 | 37.6 | 5.9 × 10⁶ | 0.53 |
| u-PA/IIIb | 9.3 | 29.8 | 3.2 × 10⁶ | 0.29 |
| u-PA/IVa | 7.03 | 38.7 | 5.5 × 10⁶ | 0.50 |
| u-PA/IVb | 7.5 | 45.3 | 6.0 × 10⁶ | 0.54 |
| Wild type u-PA | 6.03 | 70.1 | 1.1 × 10⁷ | 1.0 |

### E. KINETIC ANALYSIS OF INHIBITION OF MUTANT u-PA ENZYMES BY WILD-TYPE PAI-1 AND MUTANT PAI-1

[0649] The second order rate constants (ki) for inhibition of mutant and wild type u-PA (positive control) were determined using pseudo-first order (ki<2×10⁶) or second order (ki>2×10⁶) conditions. For each enzyme, the concentrations of enzyme and inhibitor (mutant PAI-1) were chosen to yield several data points for which the residual enzymatic activity varied between 20 and 80% of initial activity. Kinetic measurements on the rate of interaction of wild-type and mutant u-PA with wild-type and mutant PAI-1 was performed at 24° C. in 0.1 M Tris-HCl buffer (pH 7.4) containing 0.1 mM EDTA and 0.1% (v/v) Tween 20. The indirect chromogenic assay as described in Part D above was used to determine the residual enzyme activity remaining as a function of time.

[0650] The rate constants for inhibition of wild-type or mutant u-PA by PAI-1 were under pseudo-first order conditions for an excess of PAI-1 over u-PA as described previously (see e.g., Holmes et al. (1987) Biochemistry, 26: 5133-5140; Beatty et al. (1980) J. Biol. Chem., 255:3931-3934; Madison et al. (1990) PNAS, 87: 3530-3533; Madison et al. (1993) Methods Enzymol., 223:249-271). Briefly, purified wild-type or mutant u-PA (3-50 fmol) were incubated at room temperature for 0 to 120 minutes with wild-type or mutant PAI-1 (35-1330 fmol). Following incubation, the mixtures were diluted and the residual enzymatic activity was determined in a standard chromogenic assay as set forth in D above. Data were analyzed by plotting In (residual activity/initial activity) versus time and determining the slope of the resulting straight line. Pseudo-first order rate constants were then derived by dividing the slope by the concentration of the inhibitor in the reaction.

[0651] For second order reactions, equimolar concentrations of wild-type or mutant u-PA and wild-type or mutant PAI-1 were mixed directly in microtiter plate wells and preincubated at room temperature for periods of time varying from 0 to 30 min. Following preincubation, the mixtures were quenched with an excess of neutralizing anti-PAI antibodies and residual enzymatic activity was measured in the indirect chromogenic assay. The indirect, chromogenic assays were compared with control reactions containing no PAI-1 or to which PAI-1 was added after preincubation and addition of anti-PAI-1 antibody, plasminogen and Spectrozyme PL to the reaction mixture. Data were analyzed by plotting In (residual activity/initial activity) versus time and determining the slope of the resulting straight line. Second order rate constants were then derived by dividing the slope by the concentration of the inhibitor in the reaction.

[0652] Table 16 below sets forth second order rate constants for inhibition of u-PA variants by PAI-1/RRAR inhibitor. The results show that the variants ARF2 and ARF36 have about a 20-fold improvement in specificity for the PAI-1/RRAR inhibitor substrate as assessed by the increased ki rate constant for inhibition as compared with wild-type u-pA.

TABLE 16

| | 2^{nd} order rate | Improvement |
|---|---|---|
| u-PA variants | constant (M⁻¹s⁻¹) | Mutant/Wt-uPA |
| u-PA/ARF2 | 1.6 × 10⁵ | 18.3 |
| u-PA/ARF36 | 1.7 × 10⁵ | 20.2 |
| Wt u-PA | 8.7 × 10³ | 1.0 |

[0653] Tables 17 and 18 below are the results of second order rate constants of inhibition for wild-type (Table 17) or mutant PAI-1/69 inhibitor (Table 18) by wild-type u-PA or u-PA variants selected against the PAI-1/69 inhibitor. The variant u-PAs set forth in each of Tables 17 and 18 are those identified from one (I) to four (IV) successive rounds of a u-PA phage library selection as depicted in Table 11 above. The results in Table 17 show that some of the mutant u-PAs (i.e. u-PA/IIIa, u-PA/IIIb, and u-PA/IVa) have a slightly increased second order rate constant for inhibition as compared to wild-type u-PA and the mutants u-PA/Ic, u-PA/IIb, and u-PA/IVb have a decreased second order rate constant for inhibition as compared to wild-type u-PA. The results in Table 18 show that the second order rate constant for inhibition is dramatically increased for each of the selected u-PA variants for inhibition by the mutant PAI-1/69 inhibitor. The results show that that each of the selected variants have a greater than 13-fold improvement in specificity for the PAI-1/69 inhibitor substrate, with variants u-PA/IIIb, u-PA/IVa, and u-PA/IVb each exhibiting close to or more than a 40-fold improvement in specificity.

TABLE 17

| | | Sensitivity |
|---|---|---|
| | | factor |
| | 2^{nd} order rate | (Mutant/Wt u- |
| u-PA mutants | constant (M⁻¹s⁻¹) | PA) |
| u-PA/Ic | 2.4 × 10⁶ | 0.3 |
| u-PA/IIb | 2.9 × 10⁶ | 0.3 |
| u-PA/IIIa | 9.7 × 10⁶ | 1.2 |
| u-PA/IIIb | 1.3 × 10⁷ | 1.6 |
| u-PA/IVa | 2.7 × 10⁷ | 1.6 |
| u-PA/IVb | 6.8 × 10⁶ | 0.8 |
| Wild type u-PA | 7.5 × 10⁶ | 1.0 |

TABLE 18

| | 2^{nd} order | |
|---|---|---|
| | rate | |
| | constant | Increased sensitivity factor |
| u-PA mutants | (M⁻¹s⁻¹) | (Mutant/Wt u-PA) |
| u-PA/Ic | 1.0 × 10⁵ | 13.7 |
| u-PA/IIb | 1.1 × 10⁵ | 15.3 |
| u-PA/IIIa | 1.8 × 10⁵ | 24.5 |
| u-PA/IIIb | 2.8 × 10⁵ | 37.5 |
| u-PA/IVa | 2.7 × 10⁵ | 35.9 |
| u-PA/IVb | 3.2 × 10⁵ | 42.6 |
| Wild type u-PA | 7.5 × 10³ | 1.0 |

### Example 6

### Selection of Variant MT-SP1 from MT-SP1 Phage Libraries Against Mutant AT3 Inhibitor

[0654] A mutant antithrombin III (AT3) inhibitor (SEQ ID NO:5) containing a hexapeptide sequence in the reactive site loop (RSL) residues P4-P3-P2-P1-P1′-P2′ of a wildtype AT3 corresponding to amino acid residues IAGRSL (SEQ ID NO: 478) was mutated to contain a substitution in these residues to SLGRKI (SEQ ID NO:479), corresponding to the amino acid residues of a complement C2 cleavage sequence. The mutant AT3^{SLGR-KI} was used as the “bait substrate” in the protease selection experiment to isolate phage with improved reactivity towards the mutant substrate sequence from a large, combinatorial MT-SP1 phage display library. In brief, for analysis of the first generation selection, 5 μl of a 1:100 SM1 (˜3×10¹³) MT-SP1 phage library that is a low mutagenic frequency library (i.e., 0.2-0.5% mutagenesis frequency) that has enzymatic activity was combined in equal representation with 5 μl of a 1:100 SM2 (˜3×10¹²) MT-SP1 phage library that contains a higher mutagenesis frequency (i.e. 0.9%). The phage libraries were mixed with 5 μl heparin (5 ng/μl; from stock of porcine intestinal mucosa), 5 μl bait AT3^{SLGR-KI} substrate (ranging in concentrations from 0 (i.e. 5 μl H₂O), 0.018 μM, 0.18 μM, 1.8 μM, or 18 μM) in the presence of 5 μl (18 μM) wildtype, plasma purified AT3 and 5 μl 10×MTSP activity buffer (0.5 M Tris HCl, pH 8, 0.3 M NaCl, 0.1% Tween 30) in a total volume of 50 μl (i.e. reaction contained 20 μl H₂O). The reaction was incubated for 4.5 hours at 37° C.

[0655] The MTSP-1 phage-AT3 inhibitor complexes were captured using CuSO₄ activated sepharose. 200 μl of chelating sepharose (Pharmacia) was pre-activated with CuSO₄ (100 mM). The CuSO₄ activated sepharose (100 μl) was blocked with 2 ml 0.5% BSA in PBS buffer for 1 hour at room temperature. The beads were harvested from the blocking solution by pelleting at 6500 rpm for 60 sec. followed by resuspension in 4501 of binding buffer (0.5 M NaCl, 100 M Tris pH 8, 10 mM Imidazole, 0.1% Tween 20). 50 μl of the above panning mixture reaction was added to the CuSO₄ activated sepharose beads to capture the His-tagged AT3 inhibitor-MTSP-1 phage complexes. The incubation was continued for another 1 hour at room temperature. Next, the panning mixture was centrifuged for 1 min at 2000 rpm and the sepharose beads containing bound AT3 phage-MTSP-1 inhibitor complexes were washed with 500 μl of binding buffer to remove unbound phages. The washing step was repeated 5 times and the beads containing bound complexes were transferred to new tubes after each wash to avoid any potential “carry over” of non-specific phages.

[0656] The bound MT-SP 1 phage-AT3^{SLGR-KI} complexes were eluted in 100 μL of elution buffer (0.5 M EDTA, pH 8.0). A 50 μl aliquot of the eluted phages was used to infect 3 ml of TG1 E. coli actively growing cells (A600=0.5; 0.5 OD=˜1.5×10⁸ colonies/ml) for 20 minutes at 37° C. The infected bacteria were plated on large plates (245 mm×245 mm) containing carbenicillin (75 μg/ml) and incubated at 30° C. overnight. The next morning the plates were harvested. The colonies on each plate were counted and compared to the background plate that contained no AT3^{SLGR-KI} inhibitor. The results of the colony counts are set forth in Table 19.

TABLE 19
Results of First Generation Selection

| Concentration of AT3^{SLGR-KI} | Colonies from first round |
|---|---|
| in reaction | of selection |
| 18 μM AT3^{SLGR-KI} | Lawn |
| 1.8 μM AT3^{SLGR-KI} | 6088 |
| 0.18 μM AT3^{SLGR-KI} | 1712 |
| 0.018 μM AT3^{SLGR-KI} | 3700 |
| 0 μM AT3^{SLGR-KI} | 840 |

[0657] The colonies from the AT3^{SLGR-KI}-containing plates were scraped into 25 ml 2YT supplemented with carbenicillin (˜100 μg/ml) after the plates had been placed in the cold room for 2 hours to firm up the agar. 20 ml of the 2YT bacteria containing medium was added to 500 ml 2YT containing carbenicillin and the A₆₀₀ was determined to be 0.13. The bacteria were grown to an OD=˜0.5 and then ˜1×10¹⁰ to 2.6×10¹³ cfu/ml of helper phage (VS M13) were added (in ˜150 μl-200 μl) for amplification of the libraries. After 1 hour of growth at 37° C. shaking, the cultures were supplemented with kanamycin to final concentrations of 3 μg/mL and grown overnight at 30° C. with shaking. The cells were harvested and the phage particles present in the supernatant were precipitated using a PEG-NaCl solution. For analysis of the second generation of MT-SP1 phage selection, the conditions were similar to the first generation, except that reaction against the AT3^{SLGR-KI} bait substrate was for only 27 minutes instead of 4.5 hours to enhance the stringency of the selection.

[0658] Following elution of the bound MT-SP1 phage-AT3^{SLGR-KI} complexes as described above, 50 μl aliquot of the eluted phages were used to infect 3 ml of TG1 E. coli actively growing cells (A600=0.5; 0.5 OD=˜1.5×10⁸ colonies/ml) for 20 minutes at 37° C. The infected bacteria were plated on large plates (245 mm×245 mm) containing carbenicillin (75 μg/ml) and incubated at 30° C. overnight. The next morning the plates were harvested. The colonies on each plate were counted and compared to the background plate that contained no AT3^{SLGR-KI} inhibitor. The results of the colony counts are set forth in Table 20.

TABLE 20
Results of Second Generation Selection

| | Colonies from | |
|---|---|---|
| | second round of | Enrichment |
| Concentration of | selection; | Ratio Compared |
| AT3^{SLGR-KI} in reaction | (background) | to Background |
| 18 μM AT3^{SLGR-KI} | 2476 (165) | 15:1 |
| 1.8 μM AT3^{SLGR-KI} | 1750 (90) | 19:1 |
| 0.18 μM AT3^{SLGR-KI} | 2012 (110) | 18:1 |
| 0.018 μM AT3^{SLGR-KI} | 1824 (89) | 21:1 |

[0659] The colonies were picked for further characterization. The cells were grown in 2 ml of 2×YT supplemented with carbenicillin (100 μg/ml) and tetracycline (10 μg/ml) and phage preparation were performed as described (Sambrook, J et al (1989) Molecular Cloning, A laboratory manual, Cold spring Harbor laboratory). The selected phage were tested for enzymatic activity against an Ac-SLGR-ACC substrate. Further, the selected phage were selected for resistance to inactivation by wildtype AT3 or Plasma.

### Example 7

### Expression and Purification of Mutant AT3 Inhibitors

### A. GENERATION OF VARIANT AT3

[0660] Mutant AT3 proteins for use as protease trap “bait substrates” were created by introducing modifications into the amino acid sequence of the AT3 reactive center loop (RCL) by using the coding region of human antithrombin III (AT3) gene (SEQ ID NO.: 612, purchased from Origene Technologies, Catalog #TC110831) as a template. The AT3 cDNA was amplified by PCR using the forward primer having the sequence of nucleic acids set forth in SEQ ID NO.: 626: GTCACTGACTGACGTGGATCCCACGGGAGCCCTGTGGACATC (which contains a stuffer sequence (shown in bold above), a BamH1 site (shown in italics), and a portion that hybridizes to the AT3 gene (shown in plain text)), and a reverse primer having the sequence of nucleic acids set forth in SEQ ID NO.: 628: GTAGCCAACCCTTGTGTTAAGGGAGGCGGAAGCCATCACCACCATCACCA CTAAGAATTC. Following amplification, the cDNA was subcloned into the pAcGP67b baculovirus transfer vector (BD Biosciences SEQ ID NO.: 494) using restriction sites Bam and EcoRI. Either a C-terminal 6×His-tag (SEQ ID NO.: 496) or a C-terminal FLAG-tag (DYKDDDDK; SEQ ID NO.: 495) was added during this subcloning step so that AT3 mutants later could be isolated by affinity purification. The nucleotide and amino acid sequence of the cloned AT3 fusion protein, containing AT3 fused to the 6×His tag using a four amino acid GGGS linker (SEQ ID NO.:620) are set forth in SEQ ID NOs.:613 and 614, respectively.

[0661] To make mutant AT3 bait substrates for isolating target proteases with various specificities, mutagenesis reactions were carried out using the Quikchange® site-directed mutagenesis kit (Stratagene) following the conditions specified by the supplier to introduce amino acids residues of target cleavage sequences in place of the wild-type AT3 reactive center loop (RCL) sequence, IAGRSL (SEQ ID NO.: 478) (amino acid residues 422-427 of the precursor AT3 polypeptide sequence set forth in SEQ ID NO.: 5; and amino acid residues 390-395 of the mature AT3 polypeptide sequence set forth in SEQ ID NO.: 493).

[0662] One such mutant, AT3 (AT3/RRVR-KE) (SEQ ID NO.: 497), was made by replacing amino acid residues of the wild-type IAGRSL amino acid sequence with amino acid residues RRVRKE (SEQ ID NO.:498) from a targeted VEGFR2 cleavage sequence. Another mutant, AT3 (AT3/SLGR-KI) (SEQ ID NO.: 499), was made by replacing the wild-type IAGRSL amino acid sequence with amino acid residues SLGRKI (SEQ ID NO.:479) from a targeted complement C2 protein cleavage sequence.

[0663] For the Quikchange® PCR, the Wild-type AT3 RCL primer had the following sequence of nucleic acids, which is set forth in SEQ ID NO: 630: GCTGCAAGTACCGCTGTTGTGATTGCTGGCCGTTCGCTAAACCCCAACAG GGTGACTTTC. The Complement C2 target sequence primer had the following sequence of nucleic acids, which is set forth in SEQ ID NO.: 632: GCTGCAAGTACCGCTGTTGTGTCGTTAGGCCGTAAAATTAACCCCAACAGGGTGA CTTTC. The VEGFR2Target sequence primer had the following sequence of nucleic acids, which is set forth in SEQ ID NO.: 634: GCTGCAAGTACCGCTGTTGTGCGCCGTGTGCGCAAAGAAAACCCCAACAG GGTGACTTTC.

[0664] Vectors containing the wild-type AT3 cDNA and vectors containing the mutant AT3 cDNA were each transformed and amplified in XL-1-Blue supercompetent cells (Stratagene). Plasmid DNA was purified from the cells using the Qiagen Plasmid Maxi Kit (Qiagen) following the conditions specified by the supplier.

### B. EXPRESSION OF AT3 MUTANTS

[0665] Sf9 insect cells were used to express and purify both His-tagged and FLAG-tagged wild-type and mutant AT3 proteins using the AT3-containing pAcGP67b transfer vectors described above. Sf9 cells were adapted for growth in SF900 II serum-free medium (Invitrogen) and grown to 85-90% confluence in 35 mm dishes. Cells were transfected using the FlashBac® baculovirus expression system (Oxford Expression Technologies) following the conditions and protocol specified by the supplier. 500 ng of the AT3 transfer vector and 500 ng of the FlashBac® recombination vector were pre-incubated for 20 min with 5 μl of Cellfectin® transfection reagent (Invitrogen) in 1 ml SF900 II serum-free media without antibiotics, then applied drop-wise to cells. Five (5) hours after transfection, cells were centrifuged and resuspended in 2 mL SF900 II serum-free medium with antibiotics (antibiotic/antimycotic solution; Cellgro) and were incubated at 28° C. for 4 days. Virus was expanded in Sf9 cells to a maximum titer of 1×10⁶ pfu/mL, as determined by plaque assay. Recombinant AT3 then was expressed using the High Five® (BTI-TN5B1-4) insect cell line (Invitrogen) and Excell™ 405 serum-free media (JRH Biosciences). Cells were infected at a multiplicity of infection (MOI) between 0.1 and 1 and grown in 300 mL culture volumes in 1 L Erlenmeyer flasks for 4-5 days, shaking at 125 RPM on an orbital shaking platform.

### C. AFFINITY-BASED PURIFICATION OF WILD-TYPE AND MUTANT AT3 PROTEINS

[0666] For affinity-based purification of His-tagged AT3 proteins, supernatants from the cultures from Example 7B were cleared by centrifugation and filtration using a 0.45 μM filter and dialyzed into a buffer containing 50 mM Sodium Phosphate pH 7.5, 300 mM NaCl. Protein was purified by column chromatography using the BioLogic Duoflow™ chromatography apparatus (Bio-Rad) and 10 mL of TALON® cobalt metal affinity resin (Clontech). The resin-bound His-tagged protein was eluted with a linear gradient of 50 mM Sodium Phosphate pH 7.5, 300 mM NaCl and 50 mM Sodium Phosphate pH 6.5, 300 mM NaCl, 150 mM Imidazole. Fractions containing protein were combined and dialyzed into AT3 storage buffer (50 mM Sodium Phosphate pH 6.5, 300 mM NaCl, 5% glycerol). To demonstrate that the purified AT3 preparation contained active protein, an MT-SP 1 inhibition (active site titration) assay, as described herein, in Example 14 below, was performed in order to measure the ability of the dialyzed AT3 to inhibit the ability of MT-SP1 to cleave a substrate. The reaction mixture from this MT-SP1 inhibition assay was assessed kinetically for cleavage of 0.4 mM Ac-RQAR-ACC (Acetyl-Arg-Gln-Ala-Arg-ACC) substrate (custom synthesis) on a SpectraMax® M5 (SpectraMax® M5 Microplate Reader, Molecular Devices) (Molecular Devices, Inc). The “ACC” in the name of this substrate refers to the 7-amino-4-carbamoylmethylcoumarin leaving group. The ACC leaving group was detected at wavelengths of Excitation (Ex)=380, Emission (Em)=450 and cutoff (c/o)=435. Total yield of purified His-tagged AT3 protein was approximately 1-3 mg/L.

[0667] For affinity-based purification of FLAG-tagged AT3 proteins, supernatants from the cultures were cleared by centrifugation and filtration as described above. Cleared supernatant was dialyzed into Tris-buffered Saline (TBS) pH 7.4 and added to a fresh 1 L Erlenmeyer flask in a total volume of 300 mL. 2 mL of pre-equilibrated anti-FLAG M2 affinity gel (Sigma) was added, and the total volume was incubated on an orbital shaking platform at 125 RPM for 3 hours at 4° C. Resin-bound FLAG-tagged AT3 protein was collected by gravity using a fritted 20 mL chromatography column (Bio-Rad). The resin was washed a first time with 5 mL of TBS, once with 5 mL of TBST (TBS with 0.1% Tween-20), and a second time with 5 mL of TBS. The AT3 protein then was eluted by adding 10 mL TBS containing 0.2 mg/mL FLAG peptide (Sigma). Eluate was concentrated and dialyzed into AT3 storage buffer (50 mM Sodium Phosphate pH 6.5, 300 mM NaCl, 5% glycerol) and activity was assayed as above, using a matriptase (MT-SP1) inhibition (active site titration) assay as described above and in Example 14A below. Total yield of purified FLAG-tagged AT3 protein was approximately 0.5-1 mg/L.

[0668] These purified FLAG- and His-tagged AT3 proteins were used as protease traps for identification of proteases recognizing particular target site sequences, for example, in the methods described in the following Examples.

### Example 8

### Construction of Phage-Display Libraries of Protease Variants

### A. CLONING OF WILD-TYPE AND C122S MT-SP1 PROTEASE DOMAIN (B-CHAIN) INTO THE pMal-C2 PHAGEMID DISPLAY VECTOR

[0669] cDNA (SEQ ID NO.: 504) encoding a mature MT-SP1 protease domain (MT-SP1 B-chain) (SEQ ID NO.: 505), which contains amino acids 615-854 of the full-length MT-SP1 protein set forth in SEQ ID NO.: 253, was cloned, using the restrictions sites Nde1 and HindIII, into a pMal-C2 vector (SEQ ID NO.: 615) (New England Biolabs), which-contains an STII leader sequence (TGAAAAAGAATATCGCATTTCTTCTTGCATCTATGTTCGTTTTTTCTATTG CTACAAACGCGTATGCA (SEQ ID NO.: 636) to facilitate secretion, and nucleic acids encoding a C-terminal domain of filamentous phage M13 GeneIII (SEQ ID NO.:616). The MT-SP1 protease domain cDNA was inserted between the leader sequence and the GeneIII domain so that the final construct contained the sequence of nucleic acids set forth in SEQ ID NO.: 510, which encodes an MT-SP1 N-terminal GeneIII fusion protein. The encoded amino acid sequence (SEQ ID NO.: 506) of this fusion protein is set forth below, with the STII leader sequence (SEQ ID NO.: 511) in plain text, the mature MT-S P1 domain in bold and the C-terminal GeneIII (SEQ ID NO.: 512) domain in italics. The * indicates the presence of a stop codon in the nucleic acid sequence encoding the protein.

SEQ ID NO.: 506:
[sequence omitted]

[0670] In addition to the wild-type MT-SP1 B-chain fusion protein, an MT-SP1 B-chain variant (CB469)-GeneIII fusion protein was generated using the method described above. The CB469 variant amino acid sequence, set forth in SEQ ID NO.: 507, was generated by substituting a serine for the cysteine at position 122 (based on chymotrypsin numbering) of the wild-type MT-SP 1 protease domain sequence, which is shown in the sequence above in italics and set forth in SEQ ID NO.: 505. This CB469 sequence was cloned into the pMal-C2 vector as described above. In order to achieve improved display, the phagemid vector containing nucleic acids encoding this variant MT-SP 1 fusion protein was used to generate MT-SP 1 mutant phage display libraries as described in Example 8B below.

### B. MUTAGENESIS OF PROTEASE DOMAINS FOR THE GENERATION OF MUTANT PHAGE DISPLAY LIBRARIES

[0671] Generation of phage display libraries containing mutated protease domains was done using standard error-prone PCR mutagenesis protocols that are known in the art (Matsumura et al., Methods Mol. Biol. 2002; 182:259-67; Cirino et al., Methods Mol. Biol. 2003; 231:3-9) as exemplified below.

### 1. Mutagenesis of B-chain MT-SP1 Fusion Proteins

[0672] For the construction of mutant MT-SP 1-containing fusion proteins, the MTSP 1 CB469 cDNA was amplified from the pMal-C2 vector by error-prone PCR using the Diversify® PCR Random Mutagenesis Kit (BD Biosciences, Clonetech) and following conditions suggested by the supplier to obtain five (5) mutations per kilobase. The MT-SP1 forward primer used in this PCR, having the sequence of nucleic acids set forth in SEQ ID NO.:508): GCGCAGATATCGTACCGCATATGAAAAAGAATATCGCATTTCTT, was designed to hybridize within the STII leader sequence (with the residues shown in italics) and contained a Nde restriction site sequence (shown in bold). The MT-SP 1 reverse Primer, having the sequence of nucleic acids set forth in SEQ ID NO.:509: GTGCATGCTGACTGACTGAGCTCCCGCTTACCCCAGTGTTCTC, was designed to hybridize within the 3′ portion of the sequence encoding the MT-SP 1 protease domain (with the residues shown in italics) and contained a Sac 1 restriction site sequence (shown in bold).

### 2. Purification of Mutagenesis Products

[0673] Taq polymerase binds tightly to DNA and thus is not completely removed by the Qiagen PCR purification kit; and its presence may interfere with downstream restriction digests of PCR products (Crowe et al., Nucleic Acids Res. 1991 Jan. 11; 19(1): 184; Wybranietz et al., Biotechniques (1998) 24, 578-580). Thus, to remove Taq polymerase from the amplified wild-type and mutant PCR products from Example 8B(1), prior to their purification, the following were added to the reaction: 5 mM EDTA, 0.5% SDS, 50 ng/μl proteinase K. To eliminate Taq polymerase, the mixture was incubated at 65° C. for 15 minutes.

[0674] To ensure that there was no wild-type template remaining (which could potentially interfere with the selection methods described below), the PCR product was purified to remove template DNA. To separate the vector from the PCR product, samples were loaded onto a 1% agarose gel in the presence of 10× Orange G Gel Loading Buffer (New England Biolabs) which does not co-migrate with the PCR product or ladder. The PCR product was excised from the gel using a scalpel. The excised product was purified using either the QIAquick® Gel Extraction Kit protocols (Qiagen) or the Zymoclean™ Gel Extraction Kit (Zymoclean CA, Cat # D4001) following the conditions specified by the supplier.

[0675] For the Qiagen Gel Extraction kit, the excised gel fragment was solubilzed in QG Buffer and slowly passed through a Qiagen QG column, each of which has a binding capacity of about 5-10 μg, and does not hold more than 2 mL. A sufficient number of columns was used to accommodate the full volume of starting material. Columns were centrifuged in collector tubes at 14,000 rpm to remove any residual Buffer QG. 0.7 mL Buffer PE was added to each column and samples were incubated for 2-5 minutes. Columns then were centrifuged twice, for an additional 1 minute each, at 13,000 rpm to remove all residual PE buffer. Samples were transferred into a new 1.5 mL microcentrifuge tube, followed by addition of 50 μL H₂O and incubation for two minutes. Bound DNA was eluted by centrifugation at 7000 rpm. Typical yield was between 30% and 60% of the starting amount of sample.

[0676] For the Zymoclean™ Gel Extraction Kit, either one or more Zymoclean™ Gel Extraction Kit columns (each of which has a 5 μg maximum binding capacity), or one or more columns from the Zymoclean™ DNA Clean & Concentrator™ Kit (each of which has a 25 μg capacity) were used, depending on the amount of starting material. Using this kit, the excised DNA fragment was transferred to a 1.5 ml microcentrifuge tube, followed by addition of three (3) volumes of ADB Buffer™ to each volume of agarose excised from the gel. Samples were incubated at 37-55° C. for 5-10 minutes until the gel slice had completely dissolved. The dissolved agarose solution was transferred to a Zymo-Spin I™ Column in a Collection Tube and centrifuged at least 10,000 rpm for 30-60 seconds. Flow through from the column was discarded. 200 μL Wash Buffer was added to the column and centrifuged at least 10,000 rpm for 30 seconds. Flow-through was discarded and the wash step repeated. 50 μL of water was added directly to the column matrix. The minimum elution volume was 10 μL for the Zymoclean™ Gel Extraction column and 35 mL for the DNA Clean & Concentrator™ column. The column was placed into a 1.5 ml tube and centrifuged at least 10,000 rpm for 30-60 seconds to elute DNA.

[0677] After elution using one of these two methods, samples were pooled and DNA concentration was assessed by measuring absorbance of the sample at 260 nm in a 70 μL UV cuvette, using a spectrofluorometer. DNA concentration was calculated according to the following equation: 1A260=50 ng/μl ds DNA.

### C. CONSTRUCTION OF PROTEASE MUTANT PHAGE LIBRARIES USING THE pMal-C2 PHAGEMID VECTOR

[0678] For construction of phage display libraries expressing mutant protease domains, digested PCR products, such as those obtained from the protease PCR mutagenesis and purification described in Example 8A and B above, were ligated into the pMal-C2 phagemid vector described above. For this process, the vector was digested using Nde1 and Sac1, and the product gel purified and combined in a ligation reaction (described below) with the purified, restriction-digested PCR products. The molecular weight (MW) of the Nde1/Sac1 digested, gel purified pSTII-g3 pMal-C2 phagemid is 5835 base pairs (bp); the MW of the Nde1/Sac1 digested MT-SP1 PCR product is 806 bp. Typically, for a 2 mL ligation reaction, 7.58 μg cut vector was about 1 nM of vector and 3.14 μg cut MT-SP1 product was about 3 nM insert product.

[0679] For ligation of the MT-SP1 products, 40 μl (3 nM, 3.14 μg) of the digested, purified product was mixed with: 40 μl (1 nM, 7.58 μg) of digested, purified vector; 1510 μl H₂O; 400 μl 5× T4 DNA Ligase Buffer (Gibco); and 10 μl (10 units) T4 DNA Ligase (New England Biolabs). The ligation reaction was carried out overnight at 16° C. or at room temperature for 4 hours in a 2 mL volume. After ligation, the DNA Ligase was heat-inactivated by incubating the ligation reaction mixture at 65° C. for 15 minutes followed by addition of 4 mL ZymoResearch DNA Binding Buffer. This sample then was added, 800 μl at a time, to a 25 μg ZymoResearch Column. The column was washed twice with 600 μl ZymoResearch Wash Buffer and eluted with 50 μL water, which had been pre-warmed to 42° C. Percent DNA recovery was assessed by measuring absorbance of diluted elution sample (3 μl elution in 70 μl H₂O) at 260 nm using a spectrofluorometer. For example, for the 3 mL ligation above, if the A260 corresponded to 0.12=140 ng/μl, then the total yield was determined to be about 7 μg (which is about 70% recovery of DNA from the ligation).

[0680] The ligation product was electroporated into XL-1 blue cells, which can accommodate approximately 500 ng/μl by electroporation. 7.5 μl of a 140 ng/μl ligation was added per 200 μl XL-1 Blue Cells (Stratagene). The cells were added to a 0.2 cm gap cuvette and electroporated in a Gene Pulsar (Bio-Rad, CA) using the following conditions: Voltage (V)=2500, Capacitance=25 (uF), Resistance=200 ohms. Immediately following electroporation, 1 mL SOC medium (Invitrogen) was added to the cuvette. The cells then were transferred to 25 mL SOC medium and incubated at 37° C. for 20 minutes. Following this incubation five (5) small aliquots (100 microliter) of serial 100-fold dilutions of the cells were made and plated on small 2YT Carbenicillin agar plates and incubated overnight at 37° C. for counting the number of colonies (representative of the number of clones from the library generated by electroporation). In one method, the remaining culture volume was centrifuged to pellet the cells followed by resuspension in 12 mL SOC buffer and plating on large agar plates (245 mm×245 mm) supplemented with Carbenicillin (75 ug/ml) and grown overnight at 30° C. Alternatively, to prepare phage stock from the library, the cells were added directly to 500 mL 2YT medium supplemented with Carbenicillin (75 ug/ml) with M13KO7 helper phage at 1×10¹⁰ CFU/mL and grown overnight at 37° C.

### Example 9

### Selection of Variant Protease Domains from Protease Domain Phage Libraries Using Mutant AT3 Protease Traps

### A. SELECTION OF MT-SP1 PHAGE/MUTANT AT3 COMPLEXES AND ELISA-BASED READOUT ASSAY

[0681] In this example, a mutant AT3 inhibitor containing the complement C2 target cleavage sequence SLGRKI, as described in Example 7 above, was used as the “bait substrate” in a panning experiment designed both to isolate and provide a readout for the presence of mutant MT-SP 1-bearing phages with improved reactivity toward the target cleavage sequence. Phages were isolated from large, combinatorial MT-SP1 phage display libraries produced as described in Examples 8A, 8B and 8C above using the following procedure.

### 1. Interaction with and Cleavage of AT3 Variants by Mutant MT-SP1-Bearing Phages

[0682] Phage-bound MT-SP1 mutants from phage libraries were first selected using mutant AT3 having the target cleavage site as follows. Each cleavage reaction was carried out in duplicate wells of a 96-well polystyrene plate (Nunc Maxysorp) for 60 minutes at 37° C., by incubating the following reaction components in a 70 μL volume: 35 μl MT-SP1 library phage at 3.14E¹² CFU/ml; 7 μL 10×MT-SP1 Activity Buffer (0.5 M Tris-HCl, pH 7.4, 1M, NaCl, 1% Tween20); 7 μL 10 μM Low Molecular Weight Heparin (BD Biosciences); 14 μL H₂O; and 7 μL of His-tagged mutant AT3-SLGRKI. Individual cleavage reactions were carried out with the following different AT3-SLGRKI concentrations: 100 nM, 33 nM, 11 nM, 3.3 nM, 1.1 nM and 0.33 M. Each reaction was terminated with the addition of 2 μL 100 mg/ml of the protease inhibitor 4-(2-Aminoethyl)-benzenesulfonyl fluoride (Pefabloc, Roche Diagnostics). 40 μL of a 0.55% BSA, 0.275% Tween 20 solution then was added and mixed thoroughly by pipetting up and down.

### 2. Capture of MT-SP1 Phage-AT3 Complexes Using Anti-His Antibodies

[0683] Meanwhile, wells in another 96-well polystyrene plate (Nunc Maxysorp) were coated for 1 hour with shaking at room temperature with 100 μL of 5 ng/ill Streptavidin (Pierce) in 0.2 M Carbonate Buffer (pH 9, Pierce). The wells then were washed three times with 250 μL PBST, blocked with 200 μL of 0.2% BSA in PBS for 2 hours at room temperature, incubated for 1 hour at room temperature with 100 μl of 5 ng/μl biotinylated Anti-6HIS antibody to capture His-tagged AT3 mutants, and washed thoroughly with PBST. Each mutant MT-SP1 phage sample from the AT3 cleavage reaction in Example 9A(1) then was added in duplicate to the coated 96 well plate and incubated for 1 hour at room temperature. Plates then were washed 14 times with 250 μL PBST.

### 3. ELISA-Based Readout for Selection of MT-SP1 Phage-AT3 Complexes

[0684] After washing, the first of the two rows in the microtiter plate was used to carry out an ELISA (Enzyme-Linked Immunoassay)-based assay to obtain a readout for phage capture. To each well in this row, 100 μL of a 1:5000 dilution of an HRP conjugate anti M13 phage antibody (GE Healthcare) was added and allowed to bind for one hour. The wells in this row then were washed 8 times using a Skanwasher plate washer (Molecular Devices), followed by addition of 100 μL TMB/Peroxide substrate solution (Pierce) and incubation at room temperature for 5 minutes. This reaction was quenched with 100 μL 2M H2SO4 and assayed on a SpectraMax® plate reader (Molecular Devices) for absorbance at 450 nM. This readout was used as a surrogate for the presence of phage-AT3 complexes. In this assay, a concentration-dependent increase in absorbance was observed (based on increasing concentrations of AT3-SLGRKI bait used in the cleavage reaction in Example 9A(1)). Further, when the process was performed using successive rounds of panning as described herein, increased absorbance was observed after each round, indicating that this panning method could successively enrich the phage pool for target cleavage site affinity. These data suggest that this method can be used to select, from a phage library, mutant protease domain fusion proteins having affinity for a particular target sequence. The ELISA assay provided a method for obtaining a readout for this selection and enrichment, using the same 96-well plate that was used for affinity-based capture and subsequent elution described in Example 9A(4) below.

### 4. Elution of Selected MT-SP1 Phage

[0685] The second of the two duplicate rows of the microtiter plate from Example 9A(2) then was used to elute specifically bound phages for use in subsequent purification and screening. To each well in this row, 100 μL 100 mM HCL was added and incubated for 5 minutes to elute the specifically bound phage. The resulting phage eluate was added to a separate well containing 33 μL of 1M Tris pH 8 for acid neutralization prior to infection. The 133 μL of neutralized phage mix then was added to 1 ml of XL-1 Blue cells growing at an OD600 of 0.5, which then were incubated for 20 minutes at 37° C. and plated out onto 2× YT agar plates (245 mm×245 mm) supplemented with Carbenicillin. These cells were used in subsequent screening, sequencing and purification methods as described in the Examples below.

[0686] This selection and ELISA-based assay method was also used to select and assess uPA mutants from uPA libraries, such as those described in Examples 2 and 3 above.

### B. PURIFICATION OF SELECTED PROTEASE DOMAIN-BEARING PHAGES

[0687] This Example describes a method for isolation of phage supernatants that had been selected using bait inhibitors. Titers (cfu/mL) of selected phages, such as those recovered in Example 9A above, were determined. Phage stocks were diluted with PBS and used to infect E. coli XL-1 Blue cells, growing at an OD600 of 0.5 or approximately 2.1×10⁸ cells/mL. The desired infectivity range was 1000-2000 colonies per plate. Infected cells were plated onto 2YT agar supplemented with 100 μg/mL Carbenicillin in square 245 mm×245 mm polystyrene BioAssay (Corning) dishes and allowed to grow for 16-20 hours or until colony size were roughly 2 mm in diameter. Using an automated Colony Picker, individual colonies were picked and dispersed into wells in a 96 well polypropylene plate, each well containing 150-170 uL of 2YT medium supplemented with 100 μg/mL Carbenicillin and 12 μg/mL Tetracycline. Control wells were inoculated with cells infected with either template phage (phage having a protease domain that had been used as the template for mutagenesis) or with phage containing fusion proteins containing inactive protease variants. The inoculated plates were sealed with an air-permeable membrane, placed into a HiGro (GeneMachines) incubator and shaken at 400 rpm at 37° C. for 14-20 hours.

[0688] After the incubation, to obtain log-phase cells, 100 μL from each well was used to inoculate a well in a deep well 96 well plate containing 1 mL 2YT medium supplemented with 100 ug/mL Carbenicillin and 12 μg/mL Tetracycline. The deep well plate then was sealed with an air-permeable membrane and placed in the HiGro® incubator with shaking at 400 rpm at 37° C. with oxygen aeration until the cell density reached an OD600 of between 0.4 and 0.6. A typical incubation period was between 4 and 5 hours. After incubation, 100 μL of a helper phage stock was added to each well and the plate sealed and shaken again at 400 rpm for 5-10 minutes at 37° C. After the 5-10 minutes of shaking, the plate was incubated at 37° C. in a static state without shaking for 30-45 minutes. Shaking then was resumed at 400 rpm for 15-30 minutes at 37° C. Following shaking, 100 μL kanamycin solution (400 μg/mL) was added to each well to yield a final concentration of 33.3 μg/mL in each well. The plate was resealed, and shaken at 400 rpm at 37° C. for 12-16 hours. To pellet the cells, the plate then was centrifuged at 3500-4500 rpm for 20 minutes at 4° C. After centrifugation, supernatants, which contained isolated phage, were either used immediately for screening as described in the Examples below, or first were stored at 4° C.

### C. POLYETHYLENE GLYCOL (PEG) PRECIPITATION OF PROTEASE DOMAIN PHAGE SUPERNATANTS

[0689] This Example describes a method for removing potentially contaminating background protease activity (to which some characterization assays described herein below are sensitive) in purified selected phage supernatants using Polyethylene Glycol precipitation. In this method, after rescuing the MT-SP1-bearing phage supernatants (such as those selected and eluted in Example 9A) overnight (12-16 hours) with helper phage samples were centrifuged for 20 minutes at 4° C. at 3500-4500 rpm and 1000 μL of supernatant was removed from each well and transferred to a well in another 96 well deep well plate.

[0690] For precipitation, 250 μL of a solution containing 20% PEG (by volume) in 2.5M NaCl was added to each well. The plate was sealed and mixed by vigorous inversion, and then placed in an ice-water bath and left static for 1-2 hours. The plate then was centrifuged for 60 minutes at 4500 rpm or for 90 minutes at 3500 rpm. The supernatant solution from each well was decanted out and the plate was patted dry and allowed to drain for 20-30 minutes. The resultant precipitate was resuspended using PBS at a final volume equivalent to 20% of the original phage supernatant volume (200 uL) to yield a 5-fold concentrate. This material either was used immediately in assays described below, or stored at 4° C. until ready for testing.

### Example 10

### Screening of Protease Domain-Bearing Phages Having Increased Reactivity and Catalytic Efficiency Towards Target Substrate Sequences

[0691] Individual phage preparations, such as those described in Example 9B and 9C, were used in various assays to determine their specificity and/or activity.

### A. ANALYSIS OF PHAGES EXPRESSING PROTEASE DOMAIN VARIANTS BY MONITORING INHIBITION OF FLUOROGENIC PEPTIDE HYDROLYSIS BY BAIT PROTEINS

[0692] As one approach for assessing mutant protease-bearing phage clones, a biochemical inhibition assay can be performed comparing the ability of an inhibitor (bait serpin) to inhibit the activity of the selected variant protease domain with its ability to inhibit the activity of the template protease domain (i.e., the “parental” protease) that was originally used in phagemid library construction. With this approach, the ability of mutant protease-bearing phages, such as those recovered in Example 9 above, to cleave a fluorogenic substrate containing a target substrate sequence is assessed in the presence and in the absence of a given concentration of inhibitor bait, and compared to the ability of the template protease domain to cleave the same sequence in the presence of the same bait. The use of fluorogenic peptide substrates is a routine method for the determination of protease specificity (Zimmerman et al. (1977) Anal Biochem, 78:47-51; Harris et al. (2000) PNAS, 97:7754-7759).

[0693] For analysis of inhibition of MT-SP 1 B-chain mutants compared to inhibition of MT-SP1 B-chain template (used for mutation in Example 8B(1)), the variant AT3 (with a desired target sequence) can be used as the inhibitor and Ac-RQAR-ACC can be used as the substrate. In this substrate, specific cleavage of the anilide bond frees the fluorescent ACC leaving group, providing an efficient means to determine the cleavage rates for individual substrates.

[0694] In one example of such an assay, the ability of uPA protease-bearing phages, such as those recovered in Example 3 above, to cleave the fluorogenic substrate Ac-AGR-AMC (SEQ ID NO.: 617) was assessed in the presence and in the absence of a given concentration of PAI bait. As described above, the use of such a 7-amino-4-methylcoumarin (AMC) fluorogenic peptide substrate is a routine method for the determination of protease specificity. In this example, 35 μL of phage supernatant (such as that obtained as described in Example 3(A)) was transferred to both a designated assay well and a designated control well in a 384-well Polypropylene plate (CoStar, #3658). 35 μL of 2× Indirect Assay Buffer containing the same PAI bait used in the selection was added to the assay wells. The concentration of bait was the same as used in the selection. 35 μL of 2× Indirect Assay Buffer (without inhibitor) was added to the corresponding control wells. The plates were incubated at 37° C. for 60 minutes. Following the mixing of the phage with inhibitor or control buffer, 10 μL of an AGR-AMC fluorogenic peptide substrate, diluted to a final assay concentration of 60 μM in Indirect Assay Buffer, was added the wells. Fluorescence was measured using a Molecular Devices SpectraMax® Plate Reader with Excitation at 380 nm, Emission set at 460 nm, using the kinetic read mode for one hour. Clones showing enhanced inhibition of the target substrate with respect to the template protease were further analyzed.

### B. ANALYSIS OF VARIANT PROTEASE ACTIVITY USING FLUOROGENIC PEPTIDE SUBSTRATES

[0695] To directly assess the activity and specificity of MT-SP1 mutants, an assay was performed using the fluorogenic peptide substrates Ac-RQAR-ACC (having the native autocatalytic cleavage sequence recognized by wild-type MT-SP1) and Ac-SLGR-ACC (Acetyl-Ser-Leu-Gly-Arg-ACC) having the C2 target site cleavage sequence). As noted above, the ACC in the names of these substrates represents 7-amino-4-carbamoylmethylcoumarin, which is the fluorescent leaving group. Also as noted above, the use of fluorogenic peptide substrates is a routine method for the determination of protease specificity (Zimmerman et al. (1977) Anal Biochem, 78:47-51; Harris et al. (2000) PNAS, 97:7754-7759). In this example, specific cleavage of the anilide bond frees the fluorescent ACC leaving group, providing an efficient means to determine the cleavage rates for individual substrates. In this method, 35 μL of 2× Indirect Assay Buffer was added to all test wells. 35 μL of phage supernatant (isolated as described in Example 9B) or re-suspended PEG precipitated phage (isolated as described in Example 9C) was added to each of the designated wells. After addition of the phage, the plate was centrifuged at 2000 rpm for 1 minute to remove air bubbles. 10 μL of each of the Peptide Substrates (Ac-SLGR-ACC (final assay concentration=125 μM)) and Ac-RQAR-ACC (final assay concentration=60 uM)) was diluted with 1× Indirect Assay Buffer and then added individually to appropriate wells. The rate of hydrolysis (ROH), measured as Relative Fluorescence Units/second (RFU/s)); indicative of substrate cleavage, was monitored over time using a SpectraMax® M5 Microplate Reader (Molecular Devices), using the kinetic read mode.

### Example 11

### Production, Selection, Assessment and Identification of MT-SP1 Mutants

### A. FLUOROGENIC ASSAY OF B-CHAIN MT-SP1 MUTANTS FROM PHAGEMID LIBRARY

[0696] This example describes a fluorogenic assay that was carried out to analyze the activity and specificity of MT-SP 1 protease domain-bearing phages produced using library produced as described in Example 8. The MT-SP1 library was prepared as described in Example 8 above, using the native B-chain of MT-SP 1 that has a serine in place of the cysteine at position 122 based on chymotrypsin numbering (SEQ ID NO.: 507) as a template. The library was prepared as described above, using the pMal-C2 vector and error-prone PCR conditions recommended by the supplier to achieve an approximate mutagenesis rate of 0.5%. The yield from this mutagenesis reaction was 4×10⁹ recombinants.

[0697] Selection of phages based on the rate of interaction with and cleavage of the variant AT3 containing the target substrate sequence (in place of the native RCL; as described in Example 7) was carried out as described in Example 9A using a polypropylene 96 well format. For this selection, 1×10¹² recombinant phages were mixed with 3.3 nM variant AT3 carrying an SLGRKI RCL sequence for 30 minutes. After washing, phage were eluted as described in Example 9A above, and used to infect XL-1 blue cells as described in example 9B.

[0698] Successive rounds of selection were performed to enrich for rapid interaction with and cleavage of the target substrate sequence using methods provided and described herein. For example, clones selected in the first round were subjected to a second round of selections as described herein, using 3.3, 1.1, and 0.33 nM AT3 for one hour as described in Example 9A(3).

[0699] Following the first round of selection, phage supernatant was prepared as in Example 9C using PEG precipitation from selected clones. Phage clones were screened using the method of Example 10(B) above, using, as fluorogenic substrates, both Ac-SLGR-ACC (containing C2 target cleavage site sequence) and Ac-RQAR-ACC (containing the native cleavage sequence for the native MT-SP 1). For each clone, the rate of fluorescence (ROF) determined from the Ac-SLGR-ACC assay was compared to the ROF determined from the Ac-RQAR-ACC assay as a means to compare the activity of each mutated MT-SP1 protease domain on the native substrate sequence to its activity on the target substrate sequences. The ROFs in the mutant MT-S P1 assays also were compared to the ROFs in the template (C122S) MT-S P1 assay. The results obtained with individual clones are shown in Table 21 below, which lists clone numbers, and lists the rate of fluorescence as RFU/s (relative fluorescence units per second).

TABLE 21
Screening of mutant MT-SP1 protease domain-bearing
phage selected for cleavage rate of AT3-SLGRKI

| | Ac-SLGR- | |
|---|---|---|
| Mutant MT- | ACC | Ac-RQAR- |
| SP1 Clone | Rate | ACC Rate |
| Number | (RFU/sec.) | (RFU/sec.) |
| Template | 1.85 | 15.6 |
| CPC-0019595 | 7.1 | 33 |
| CPC-0023085 | 0.8 | 2 |
| CPC-0023230 | 1.3 | 4 |
| CPC-0023401 | 3.9 | 12 |
| CPC-0023949 | 0.7 | 2 |
| CPC-0024129 | 3.8 | 15 |
| CPC-0024153 | 2.5 | 6 |
| CPC-0024527 | 4.3 | 12 |
| CPC-0024715 | 3.2 | 12 |
| CPC-0025366 | 1.3 | 1 |
| CPC-0025387 | 6.8 | 14 |
| CPC-0025533 | 6.9 | 23 |
| CPC-0025582 | 1.7 | 3 |
| CPC-0025720 | 2.5 | 5 |
| CPC-0025866 | 1.2 | 4 |
| CPC-0025876 | 4.0 | 8 |
| CPC-0025890 | 10.6 | 33 |
| CPC-0025941 | 1.0 | .4 |
| CPC-0025974 | 9.3 | 41 |
| CPC-0026100 | 14.8 | 25 |
| CPC-0026122 | 6.5 | 31 |
| CPC-0026125 | 17.4 | 84 |
| CPC-0026200 | 7.0 | 21 |
| CPC-0026219 | 8.0 | 23 |
| CPC-0026232 | 7.1 | 15 |
| CPC-0026597 | 11.0 | 34 |
| CPC-0026727 | 0.8 | 2 |
| CPC-0026761 | 7.8 | 25 |
| CPC-0027290 | 3.9 | 12 |
| CPC-0027306 | 11.0 | 50 |
| CPC-0027309 | 8.3 | 50 |
| CPC-0027326 | 9.1 | 54 |
| CPC-0027335 | 12.3 | 57 |
| CPC-0027369 | 2.3 | 11 |
| CPC-0027399 | 13.4 | 99 |
| CPC-0027484 | 2.5 | 12 |
| CPC-0027516 | 3.4 | 17 |
| CPC-0027617 | 1.4 | 7 |
| CPC-0027706 | 0.4 | 1 |
| CPC-0027718 | 2.1 | 7 |
| CPC-0027797 | 5.5 | 15 |
| CPC-0027841 | 2.7 | 9 |
| CPC-0028017 | 5.1 | 16 |
| CPC-0028333 | 5.6 | 17 |
| CPC-0028341 | 5.5 | 26 |

### B. IDENTIFICATION OF SELECTED MT-SP1 MUTANT PHAGES BY DNA SEQUENCING

[0700] This Example describes a method used for identification of positive phage clones that were prepared as described in the previous Examples and selected based on results from a fluorogenic assay, such as the one described in Example 10B above. For this method, individual clones were mixed with XL-1Blue E. coli cells for infection and the cultures grown overnight shaking at 37° C. Plasmid DNA was purified from the overnight culture using a plasmid preparation kit (Qiagen), and the DNA sent out for sequencing for identification of the mutants.

[0701] In one example of this method, the amino acid sequences of selected B-chain MT-SP1 mutants from Example 11A above were identified using the steps outlined above. The sequencing primer that was used for identification of these clones is set forth in SEQ ID NO.: 618: 5′GGTGTTTTCACGAGCACTTC3′. The results obtained by analyzing the sequencing data are set forth in Table 22 below. This table lists only mutants with residues found to be mutated in more than one isolate. Table 22 lists the amino acid mutations/positions for each clone compared with the wild-type MT-SP1 B-chain sequence (SEQ ID NO.: 505), which were determined by analysis of sequencing data. Amino acid numbering is according to chymotrypsin numbering. SEQ ID NOs. also are listed for both the sequence of amino acid residues that encodes the MT-SP1 protease domains (B-chains) containing the indicated amino acid mutations and also for the sequence of amino acid residues that encodes the full-length MT-SP1 protein having the same mutations.

TABLE 22
Selected MT-SP1-mutants

| Mutant MT- | | SEQ ID NO | |
|---|---|---|---|
| SP1 Clone | Amino Acid Mutation (Chymotrypsin | (protease | SEQ ID NO |
| Number | Numbering) | domain).: | (full-length).: |
| CPC-0019595 | C122S/I136T/N164D/T166A/F184(A)L/D217V | 516 | 537 |
| CPC-0023085 | I41F/C122S | 517 | 538 |
| CPC-0024153 | I41F/C122S/A126T/V244G | 518 | 539 |
| CPC-0025366 | D23E/I41F/T98P/C122S/T144I | 519 | 540 |
| CPC-0025387 | I41F/C122S | 520 | 541 |
| CPC-0025582 | I41F/C122S/L171F/V244G | 512 | 542 |
| CPC-0025720 | C122S/H143R/Q175R | 522 | 543 |
| CPC-0025876 | I41F/C122S/L171F | 523 | 544 |
| CPC-0025974 | C122S/R230W | 524 | 545 |
| CPC-0026100 | I41F/C122S/I154V/V244G | 525 | 546 |
| CPC-0026232 | I41F/L52M/C122S/V129D/Q221(A)L | 526 | 547 |
| CPC-0027399 | F99L/C122S | 527 | 548 |
| CPC-0027706 | F97Y/C122S/I136V/Q192H/S201I | 528 | 549 |
| CPC-0027797 | H71R/C122S/P131S/D217V | 529 | 550 |
| CPC-0028017 | C122S/D217V | 530 | 551 |
| CPC-0028333 | T65K/F93L/F97Y/C122S/D217V | 531 | 552 |

### Example 12

### Preparation and Characterization of Large Quantities of Selected Phage-Bound MT-SP1 Protease

### A. LARGE-SCALE PREPARATION OF MT-SP1 PHAGE

[0702] This Example describes preparation of larger quantities of selected MT-SP1 protease domain-bearing phages for analysis and subsequent use of selected protease domains in downstream methods, such as in vitro translation in whole MT-SP1 proteases. For this Example, single phage-bearing colonies, selected as in Example 11 above, were grown overnight in 2YT medium supplemented with Carbenicillin, at a final concentration of 50 μg/mL, and tetracycline, at a final concentration of 12 μg/mL, in small sterile Corning Orange Capped Erlenmeyer Flasks overnight. To make glycerol stocks, 85 μL 60% glycerol was added to 500 μl of each culture followed by storage at −80° C. The remaining volume of each culture was added to a 2 L widemouth baffled flask containing 500 ml 2YT medium supplemented with Carbenicillin and Tetracycline. Alternatively, this step was performed in a 500 mL flask in a 50 mL volume. The culture was grown until an OD600 of 0.5 was reached.

[0703] M13KO7 Helper Phage was added to the culture to yield 1E¹⁰ CFU/ml and the culture incubated for 1 hour at 37° C. Kanamycin was added to a final concentration of 30 μg/mL. The cultures with helper phage were rescued overnight by incubation at 37° C. Following overnight culture, samples were centrifuged at 6000 rpm for 15 minutes. One volume PEG/NaCl (20% PEG 8K/1.5 M NaCl) solution was added per 5 volumes of culture. The sample then was stirred at 4° C. for 20 minutes. Samples were centrifuged at 10,000 rpm for 20 minutes and supernatants removed. After a second centrifugation step at 10,000 rpm, the pellet was resuspended in 5 mL (for the initial 500 mL volume) or 1 mL (for the initial 50 mL volume) PBS. Precipitated cells that were not resuspended were removed by brief centrifugation at 14,000 rpm for 2 minutes. Glycerol was added, at 10% by volume, to the supernatant containing the resuspended cells. The cells were frozen at −80° C.

### B. ASSAY OF PREPARED PHAGE USING ACC AND QF SUBSTRATES

[0704] This Example describes a fluorogenic assay used to assess activity and specificity of the phages prepared in Example 12A. PEG-precipitated mutant MTSP 1-bearing phage clones, prepared using the 50 mL volume culture as described in Example 12A, were normalized to 1E¹³ particles/ml. The phage were then assayed enzymatically using the ACC fluorogenic and QF (Quenched Fluorescence) substrates as follows. 5 μL phage (at 1E¹³ particles/ml) was added to each well in a black Costar polypropylene half-well microtiter plate (Corning) along with 5 μL 10×MT-SP1 assay buffer, 35 μL H₂O and 5 μL substrate in a total volume of 50 μL. The substrates used in individual wells were: Ac-SLGR-ACC (120 uM final concentration), Ac-RQAR-ACC (60 uM final concentration), or the following quenched-fluorescence substrates: SLGR-KI, and RQAR-SA (both used at 0.625 uM final concentration). The Ac-SLGR-ACC substrate was used to assess cleavage, by the mutant MT-SP1 clones, of the target (complement C2) cleavage sequence, while the Ac-RQAR-ACC substrate was used to assess cleavage of the native target cleavage sequence for MT-SP1. Likewise, the SLGR-KI substrate was used to assess cleavage of the target (complement C2) cleavage sequence, while the RQAR-SA substrate was used to assess cleavage of the native target cleavage sequence for MT-SP1. The ratio of these two cleavage rates was one quantitative measure of the specificity of the selected proteases for the targeted, new cleavage sequence. Comparison of these ratios for a selected variant and the corresponding original scaffold (i.e., parental) protease indicated whether the selected protease exhibited enhanced selectivity towards the targeted, new cleavage sequence. For the ACC Readout, the SpectraMax® plate reader was set for excitation at 380 nM and to detect emission at 460 nM, with a 435 nM cutoff. For the QF readout, the SpectraMax® plate reader was set for excitation at 490 nM, to detect emission at 520 nM, with a cutoff of 515 nM. The results of this assay are set forth in Table 23 below. As above, SEQ ID NOs. are listed for both the sequence of amino acid residues that encodes the MT-SP1 protease domains (B-chains) containing the indicated amino acid mutations and also for the sequence of amino acid residues that encodes the full-length MT-SP1 protein having the same mutations, as determined by sequencing, as described in Example 11B above. RFU (relative fluorescence units) numbers correspond to the rate of hydrolysis observed in a 60 minute reaction at 37° C. for each substrate.

TABLE 23
Kinetic assay of selected MT-SP1 protease domain-bearing phage
clones

| Mutant | Amino Acid | SEQ ID | SEQ ID | Ac- | Ac- | | |
|---|---|---|---|---|---|---|---|
| MT-SP1 | Mutation | NO. | NO. | SLGR- | RQAR- | SLGR- | RQAR- |
| Clone | (Chymotrypsin | (protease | (full- | ACC | ACC | KI | SA |
| Number | Numbering) | domain): | length): | (RFU/s) | (RFU/s) | (RFU/s) | (RFU/s) |
| Template | C122S | 507 | 515 | 2.4 | 23.5 | 0.12 | 0.11 |
| CPC- | I41T/C122S/P173S/ | 531 | 553 | 10.9 | 56.8 | 0.36 | 0.48 |
| 0028341 | Q209L | | | | | | |
| CPC- | F97L/C122S/F234L | 533 | 554 | 6.2 | 37.2 | 0.21 | 0.19 |
| 0033634 | | | | | | | |
| CPC- | C122S/Q175R | 534 | 555 | 3.4 | 11.0 | 0.20 | 0.18 |
| 0028971 | | | | | | | |
| CPC- | N95K/C122S | 535 | 556 | 2.0 | 9.5 | 0.07 | 0.05 |
| 0027484 | | | | | | | |
| CPC- | Y60(G)S/C122S | 536 | 557 | 0.5 | 1.0 | 0.02 | 0.01 |
| 0028993 | | | | | | | |

*RFU/s = Relative fluorescence units/second (Rate of hydrolysis)

### Example 13

### Expression of Selected MT-SP1 Mutant Proteins Using In Vitro Translation

[0705] This example describes the expression of MT-SP1 protease domains selected and screened as in the Examples described above, that are not part of a gene III fusion protein.

### A. SUBCLONING OF MT-SP1 SEQUENCE INTO A MODIFIED IVEX VECTOR

[0706] In order to express MT-SP1 protease domains selected on phage, as described in the Examples above, that are not synthesized as gene III fusion proteins, the coding region for the MT-SP 1 protease domain containing the N-terminal activation sequence and a C-terminal 6×His tag was cloned into the pIVEX.2.3d RTS in vitro translation vector (Roche; SEQ ID NO.: 559)) using the NdeI and XhoI restriction sites. The full N-terminal amino acid sequence of the pIVEX.2.3d.MT-SP1 preceding the RQAR cleavage site is set forth in SEQ ID NO.: 558: MEKTRHHHHHHSGSDCGLRSFTRQAR. Residues encoding MT-SP1 B-chain proteins, which had been selected using phagemid libraries as described above, assayed using fluorogenic screening methods as described in Example 10B and 11A, and sequenced as described in Example 11B, were subcloned into the pIVEX.2.3d.MT-SP1 vector using the internal SphI and BsrGI restriction sites. Phagemid selectants having mutations in the MT-SP1 sequence that were outside these internal sites were created for use in this method by PCR mutagenesis.

### B. EXPRESSION OF MT-SP1 BY IN VITRO TRANSLATION

[0707] Expression of MT-SP1 protease domains using an in vitro translation kit, the RTS 100 E. coli Disulfide kit (Roche Applied Science), was performed using conditions specified by the supplier with the following optimizations: The components of the 50 μl reaction solution were modified to include 12 μl of amino acid mix, 10 μl of reaction mix, 12 μL of lysate, along with the addition of 5 μl of 1 M Hepes pH 8 buffer, 2.5 μl 12 nM Tween-20, 2.5 μl of Protein Disulfide Isomerase (PDI), and 6 μl of the chaperone RTS GroE Supplement (Roche Applied Science). The 1 mL Feeding mix was also modified to include 168 μl of amino acid mix, 24 μl of methionine, 608 μl of feeding mix, 100 μl of 1 M Hepes pH 8, 50 μl of 12 nM Tween-20, and 50 μl of water. The in vitro translation (IVT) reaction was incubated on a plate shaker at 30° C. for 18 hours.

### C. PURIFICATION OF HIS-TAGGED MT-SP1

[0708] Following the in vitro translation (IVT) reaction, insoluble protein was cleared by centrifugation and transferred to a fresh tube. The cleared supernatant (with a volume approximately 45 μl) was brought up to a final volume of 1 mL in 50 mM Sodium Phosphate pH 7.5, 300 mM NaCl. The solution was applied to 300 μl of pre-equilibrated TALON® resin in a 2 mL fritted chromatography column (Clontech) and allowed to flow through by gravity. The column was washed with 3 mL of a solution containing 50 mM Sodium Phosphate pH 7, 300 mM NaCl and 7.5 mM Imidazole; and eluted with 600 μl of a solution containing 50 mM Sodium Phosphate pH 6.5, 300 mM NaCl and 75 mM Imidazole. Eluate was dialyzed into phosphate-buffered saline with 0.1% Tween-20 (PBST) and concentrated to 20 μL. Typically, the yield of purified protease was approximately 70%.

### Example 14

### Characterization of Mutated MT-SP1 Protease Domains

[0709] This Example describes the characterization of the mutated mutant MT-SP 1 protease domains that were produced as in Example 13 above.

### A. ACTIVE SITE TITRATION OF IVT REACTIONS

[0710] To assess protease activity, active site titration of in vitro-translated mutant MT-SP1 protease domains was performed on cleared supernatant with the MT-SP1 inhibitor M84R Ecotin, as described (Takeuchi et al, (1999) PNAS 96, 11054-11061). For this assay, IVT protein was diluted to a final concentration of 1:10,000 in 1× MT-SP1 activity buffer and incubated with 15 nM Ecotin in 1:2.5 serial dilutions for 1 hour at 30° C. The reaction was assessed kinetically for cleavage of 0.4 mM Ac-RQAR-ACC substrate on a SpectraMax® M5 Microplate Reader (Molecular Devices, Inc). The ACC leaving group was detected at wavelengths of Excitation (Ex)=380, Emission (Em)=450 and cutoff (c/o)=435. The assay points showing fractional activity between 20% and 80% uninhibited activity was plotted on a graph of activity vs. Ecotin concentration, and a line plotted though the points. The x-intercept of the line was used to establish the active concentration of the IVT protease. The reaction was graphed, with the linear part of the curve representing the active concentration of the IVT protease. Thus, the active site concentration (set forth for several mutants in Table 24 below; Active Site Conc.) was determined using Active Site Titration.

### B. ASSAY OF IVT MT-SP1 PROTEASE DOMAIN MUTANTS WITH ACC AND QF SUBSTRATES

[0711] Several IVT-produced MT-SP1 phage selectants were assessed for increased specificity for the mutant RCL cleavage site over the native RQAR MT-SP1 cleavage site by quenched fluorescence (QF) kinetic enzyme assays. IVT supernatants, cleared as described in Example 13C above, were diluted 1:10,000 in 1×MT-SP1 activity buffer and incubated with 6.25 μM of either the native RQAR-SL QF substrate or the mutant RCL C2 cleavage substrate, SLGR-KI. Cleavage was assessed using a SpectraMax® M5 Microplate Reader (Molecular Devices) with wavelengths of Ex=490, Em=520 and c/o=515. The relative specificity of the IVT-produced protease for the RCL target sequence over the native sequence was calculated using the ratio of the RFU/s (Relative fluorescent units per second) for SLGR-KI and RQAR-SL. The results are set forth in Table 24 below. In the column labeled SEQ ID NO., the SEQ ID NOs. setting forth the amino acid sequence of the protease domains containing the indicated amino acid mutations are listed first; and the SEQ ID NOs. setting forth the sequence of amino acid residues that encodes the full-length MT-SP1 containing the indicated amino acid mutations is shown in parentheses. RFU numbers indicate the measured relative fluorescence units (rate of hydrolysis) for each substrate.

TABLE 24
Kinetic assay of mutant MT-SP1 protease domains

| Mutant | Amino Acid | | | Ac- | Ac- | Ac- | |
|---|---|---|---|---|---|---|---|
| MT-SP1 | Mutation | SEQ | Active | SLGR- | RQAR- | SLGR- | Ac-RQAR- |
| Clone | (Chymotrypsin | ID | Site | ACC | ACC | KI QF | SA QF |
| Number | Numbering) | NO.: | Conc. | RFU/s | RFU/s | RFU/s | RFU/s |
| CPC- | C122S/H143R/ | 522 | 3.9 | 0.10 | 0.46 | 0.05 | 0.04 |
| 0025720 | Q175R | (543) | | | | | |
| CPC- | I41F/C122S/L171F | 523 | 2.5 | 0.10 | 0.39 | 0.00 | 0.01 |
| 0025876 | | (544) | | | | | |
| CPC- | F99L/C122S | 527 | 4.2 | 0.55 | 9.84 | 0.04 | 0.09 |
| 0027399 | | (548) | | | | | |
| CPC- | H71R/C122S/P131S/ | 529 | 3.7 | 0.31 | 1.62 | 0.14 | 0.19 |
| 0027797 | D217V | (550) | | | | | |
| CPC- | C122S/D217V | 530 | 4.7 | 1.42 | 7.29 | 0.38 | 0.50 |
| 0028017 | | (551) | | | | | |
| CPC- | T65K/F93L/F97Y/ | 531 | 3.6 | 1.05 | 5.97 | 0.37 | 0.51 |
| 0028333 | C122S/D217V | (552) | | | | | |
| Template | C122S | 507 | 3.5 | 0.22 | 3.58 | 0.05 | 0.06 |
| | | (515) | | | | | |

### Example 15

### Expression of Selected MT-SP1 Mutant Proteins as Purified Protein

### A. TRANSFER OF MT-SP1 PROTEASE DOMAIN INTO pQE VECTOR

[0712] A subset of MT-SP1 protease domain-bearing phage clones assayed in the previous Examples was selected for transfer of the MT-SP 1 protease domain sequence, into a pQE30 expression vector that was previously modified for expression of wild-type MT-SP 1 protease domain. The InFusion DryDown PCR Cloning Kit (Clonetech) was used to transfer selected clones into pQE30-MT-SP1 (SEQ ID NO.: 624) using conditions specified by the supplier and as described by Benoit et al. (2006), Protein Expression & Purification 45:66-71. For this process, a portion of the phage clone DNA encoding the MT-SP 1 protease domain was amplified by polymerase chain reaction (PCR) with the pQE-Insert-F2 forward primer: TTCACGAGACAGGCTCGTGTTGTTGGGGGCACGGAT (SEQ ID NO.: 560) and pQE-Insert-R3 reverse primer: CAGCTAATTAAGCTTATTATACCCCAGTGTTCTCTTT (SEQ ID NO.: 561), each carrying non-annealing 5′ tails. Plasmid pQE30-MT-SP1 without the protease domain of MT-SP 1 was linearized using PCR with the forward primer: pQE-Linear-F2: ACGAGCCTGTCTCGTGAATGACCGCAGCCC (SEQ ID NO.: 562) and reverse primer: pQE-Linear-R1: TAATAAGCTTAATTAGCTGAGCTTGGACTCC (SEQ ID NO.: 563) followed by treatment of both the donor and acceptor PCR products with DpnI enzyme. For each linearizing primer sequence set forth above, the 18-nt long homology region, a non-annealing 5′ primer tail, is shown in bold. Both acceptor and donor DNA were then mixed together, and the InFusion reaction was run in a 10 μL volume using conditions specified by the supplier. 2 μL of the reaction mix was transformed into 50 μL of E. coli TOP 10F′ competent cells (Invitrogen, Carlsbad, Calif.). Colonies were selected on LB agar plates supplemented with 100 ppm Carbenicillin. Plasmid DNA was isolated from selected clones, and sequenced using the forward primer: MT-SP1-SF: GGAGAAACCGGCAGAGTAC (SEQ ID NO.: 564) and reverse primer MT-SP1-5R: GGTTCTCGCAGGTGGTCTG (SEQ ID NO.: 565) to verify correct transfer. These primers are fully annealing.

### B. EXPRESSION, REFOLDING AND PURIFICATION OF MUTATED MT-SP1 PROTEASE DOMAINS

[0713] Plasmids encoding the protease domain of MT-SP 1 variants in the pQE30 vector (Qiagen) described in Example 15B above were transformed into BL21-Gold(DE3) E. coli cells (Stratagene). Small starter cultures containing 1 mL LB supplemented with 100 μg/mL Carbenicillin were inoculated from colonies and incubated for between 8 and 10 hours at 37° C. 100 μL of this culture was used to inoculate 50 mL of 2×YT medium supplemented with 100 μg/mL Carbenicillin and grown overnight. In 50 mL conical tubes (Corning), the cells were harvested by centrifugation then lysed. Inclusion bodies (IB) were isolated with BugBuster® Reagent (Novagen) using the conditions specified by the supplier. The IB pellets were solublized with 1 mL of a denaturing solution containing 100 mM Tris pH 8, 6 M GdmHCL and 20 mM DTT. After removal of any insoluble material by centrifugation in microcentrifuge tubes (20,000×g for 10 min), the supernatant was diluted into 40 mL refolding solution, containing 1.5 M arginine, 100 mM Tris pH 8, 150 mM NaCl, 5 mM reduced glutathione and 50 μM oxidized glutathione, in 50 mL conical tubes (Corning). The tubes were placed horizontally on a Nutator platform (Fisher Scientific) at 4° C. for 3-4 days. The refolded, not yet activated, MT-SP 1 variants then were extensively dialyzed at room temperature against 25 mM Tris pH 8, 25 mM NaCl for 3-4 days Following the removal of arginine during dialysis, MT-SP1 protease domain variants were able to activate.

[0714] Crude preparations of activated MT-SP I protease domain variants were then chromatographed on a 5 mL HiTrap™ Q HP column (GE Healthcare) attached to an AKTA system operating in an automated mode enabling the processing of up to seven variants per round. The running buffer was 25 mM Bis-Tris pH 6.5 and purified MT-SP1 was eluted within a 50 mL gradient to 350 mM NaCl. Active fractions were pooled, then buffer exchanged into PBS+20 mM benzamidine and concentrated to 0.5-10 mg/mL using Amicon-Ultra 15 devices (Millipore) with a MWCO of 10 kDa. Finally, aliquots were flash-frozen in liquid nitrogen and stored at −80° C.

### Example 16

### Preparation of Biotinylated Mutant PAI Inhibitor Baits

[0715] This Example describes methods that were used to express and purify mutant PAI inhibitor proteins, tagged with biotin for capture on streptavidin coated surfaces, for use in selecting variant uPA proteases from uPA libraries. These mutant PAI inhibitors are also useful for selection of some variant MT-SP1 proteases from MT-SP1 libraries, depending on the MT-SP1 variant and the RCL sequence used in the PAI.

### A. N-TERMINAL BIOTINYLATION OF 6×HIS-PAI-1

[0716] For biotinylation of 6×His-PAI-1 or reactive center loop variants thereof, wild-type His-tagged PAI-1 (SEQ ID NO.: 625) and His-tagged PAI-1 variants, as described herein in Example 1, were transformed into the Rosetta-2 (DE3)pLysS host strain (Novagen). Expression was carried out essentially as described (Blouse, G. E., Perron, M. J., Thompson, J. H., Day, D. E., Link, C. A., and Shore, J. D. (2002) Biochemistry 41(40), 11997-12009), with the following modifications. Induction was carried out for three hours at 30° C. in 2×YT medium supplemented with 0.2% glucose, 100 ug/mL Carbenicillin and 10 ug/mL chloramphenicol (Cm). The active fraction of 6×His-PAI-1 then was purified from the cell lysates as described (Blouse, G. E., Perron, M. J., Kvassman, J. O., Yunus, S., Thompson, J. H., Betts, R. L., Lutter, L. C., and Shore, J. D. (2003) Biochemistry 42(42), 12260-12272; Kvassman, J.-O., and Shore, J. D. (1995) Fibrinolysis 9, 215-221).

[0717] 6×His-PAI-1 variants were preferentially biotinylated at the N-terminus using the disulfide cleavable reagent EZ-Link NHS-SS-PEO₄-Biotin (PIERCE, Rockford, Ill. #21442). Reactions were carried out at pH 6.2, for 4 hours, at 4° C. on ice in a buffer containing 50 mM NaPi/300 mM NaCl/1 mM EDTA. The reaction was initiated by the addition of a 5-fold molar excess of biotinylation reagent dissolved in DMSO. The final concentration of DMSO in the reaction was maintained at below 1%. The Biotinylation reaction was quenched by the addition of 0.5 M Tris/1.0 NaCl/10 mM EDTA, pH 7.4 to a final Tris concentration of 20 mM. Excess biotinylation reagent was removed by extensive dialysis against a storage buffer containing 50 mM NaPi/300 mM NaCl/1 mM EDTA, pH 6.2. The concentration of PAI-1 in the resulting solution was confirmed using an extinction coefficient of 0.93 mL mg⁻¹ cm⁻¹ (see: Kvassman, J.-O., and Shore, J. D. (1995) Fibrinolysis 9, 215-221). The extent of biotinylation was determined using the EZ-Quant HABA/Avidn kit (PIERCE, Rockford, Ill. #28005), following the supplier-specified conditions, and was typically between 1.0 and 1.2 moles biotin per 1 mole PAI-1 variant.

### B. IN VIVO BIOTINYLATION OF PAIS

### Biotinylation of BRS-TEV-OptiPAI-1^{stab} In Vivo

[0718] This Example describes a method that was used to in vivo biotinylate PAI. In this Example, an appropriate recognition sequence was incorporated into the gene encoding the bait molecule so that the biotin-tagging of the bait could be accomplished in growing cells, instead of being carried out with purified bait in vitro. A gene encoding stable PAI-1 protein (PAI-1^{stab}, having the sequence of amino acid residues set forth in SEQ ID NO.: 567), which has N150H, K154T, Q319L and M354I mutations (Berkenpas, M. B., Lawrence, D. A., and Ginsburg, D. (1995) EMBO J. 14(13), 2969-2977), was designed to contain the following regions in the following order: 1) Start codon, 2) Biotin Recognition Sequence (BRS), 3) Tobacco Etch Virus Protease Sequence (TEV) 4) PAI coding sequence 5) stop codon; with Escherichia coli codon optimization. This synthetic PAI-1^{stab} gene was cloned into the commercial expression vector pET21-a (Novagen, Madison, Wis.) (SEQ ID NO.: 566) using XbaI and HindIII restriction enzymes resulting in plasmid pCAT0002 (SEQ ID NO: 619), which expressed Optimized PAI-1 (OptiPAI-1; encoded by the amino acid sequence set forth in SEQ ID NO.: 621, in which amino acid residue positions 3-17 and 20-26 correspond to the BRS and TEV sites, respectively) using the T7 expression system. Plasmid pCAT0002 was then co-transformed into E. coli BL21-Gold (DE3) competent cells (Stratagene, San Diego, Calif.) carrying the plasmid pBirA (described in Asai et al., (1999) J. Biol. Chem. 274:20079-20078), which overexpresses the E. coli biotin ligase, BirA. Transformants were selected on Luria-Bertani (LB) agar plates supplemented with 100 ug/mL Carbenicillin and 10 μg/mL chloramphenicol (Cm).

[0719] Expression of BRS-TEV-OptiPAI-1^{stab} (SEQ ID NO.: 621) and reactive center loop variants thereof was carried out essentially as described (Blouse, G. E., Perron, M. J., Thompson, J. H., Day, D. E., Link, C. A., and Shore, J. D. (2002) Biochemistry 41(40), 11997-12009), with the following modifications. Induction was initiated by the addition of 0.1 mM IPTG and 0.1 mM D-biotin for three hours at 30° C. in 2×YT medium supplemented with 0.2% glucose, 100 μg/mL Carbenicillin and 10 μg/mL chloramphenicol (Cm). The active fraction of BRS-TEV-OptiPAI-1^{stab} was subsequently purified from the cell lysates as described (see: Blouse, G. E., Perron, M. J., Kvassman, J. O., Yunus, S., Thompson, J. H., Betts, R. L., Lutter, L. C., and Shore, J. D. (2003) Biochemistry 42(42), 12260-12272; and Kvassman, J.-O., and Shore, J. D. (1995) Fibrinolysis 9, 215-221) or by selection by chromatography on monomeric avidin (PIERCE, Rockford, Ill. #20227), following the conditions specified by the supplier, with the following modifications. The binding buffer contained 50 mM Tris/100 mM NaCl/1 mM EDTA/0.01% tween-80 and had a pH of 7.4; and a competitive elution buffer was used that contained this binding buffer plus 2 mM D-biotin. Biotin from the competitive elution step was removed by extensive dialysis against a storage buffer containing 50 mM NaPi/300 mM NaCl/1 mM EDTA, pH 6.2. The PAI-1 concentration was confirmed using an extinction coefficient of 0.93 mL mg⁻¹ cm⁻¹ as described (Kvassman, J.-O., and Shore, J. D. (1995) Fibrinolysis 9, 215-221).

### C. IN VITRO BIOTINYLATION OF V1C OPTIPAI-1^{stab}

[0720] This Example sets forth methods for N-terminal Biotinylation of a PAI variant. The methods described in this Example were carried out to incorporate an appropriate reactive group into the gene encoding the PAI bait molecule, such that the tagging of the bait with biotin could be accomplished after the protein had been purified, allowing position-specific labeling of the bait. In this Example, since native PAI does not contain any cysteine residues, a cysteine codon was added to the DNA encoding the PAI gene to create a Cys-containing PAI that could then be reacted with Cys-reactive biotinylation reagents.

[0721] The N-terminal BRS-TEV sequence of OptiPAI-1, in plasmid pCAT0002 described above, was deleted with simultaneous introduction of V1C mutation using the QuikChange-XL mutagenesis Kit (Stratagene, San Diego, Calif.), according to supplier specifications, resulting in plasmid pCAT0051 (SEQ ID NO.: 623) expressing V1C OptiPAI-1^{stab} protein (SEQ ID NO.: 622). Plasmid pCAT0051 was transformed into E. coli BL21(DE3) pLysS competent cells (Stratagene, San Diego, Calif.). Transformants were selected on Luria-Bertani (LB) agar plates supplemented with 100 ug/mL Carbenicillin and 10 ug/mL chloramphenicol (Cm).

[0722] Expression of the V1C OptiPAI-1^{stab} protein and reactive center loop variants thereof was carried out essentially as described (Blouse, G. E., Perron, M. J., Thompson, J. H., Day, D. E., Link, C. A., and Shore, J. D. (2002) Biochemistry 41(40), 11997-12009), with the following modifications. Induction was initiated by the addition of 0.1 mM IPTG for three hours at 30° C. in 2×YT medium that was supplemented with 0.2% glucose, 100 ug/mL Carbenicillin and 10 ug/mL chloramphenicol. The active fraction of the V1C OptiPAI-1^{stab} or variant thereof was purified from the cell lysates as described (Blouse, G. E., Perron, M. J., Kvassman, J. O., Yunus, S., Thompson, J. H., Betts, R. L., Lutter, L. C., and Shore, J. D. (2003) Biochemistry 42(42), 12260-12272; and Kvassman, J.-O., and Shore, J. D. (1995) Fibrinolysis 9, 215-221).

[0723] The V1C OptiPAI-1 proteins and variants were biotinylated at the engineered N-terminal cysteine residue using the thiol-reactive and reversible biotinylation reagent, EZ-Link Biotin-HPDP(N-(6-(Biotinamido)hexyl)-3′-(2′-pyridyldithio)propionamide) (PIERCE, Rockford, Ill. #21341). Biotin conjugation was accomplished according to the supplier specifications, with some modifications, as follows. Stock solutions of biotin-HPDP were prepared at 5 mg/mL in anhydrous DMF (9.3 mM). V1C OptiPAI-1^{stab} was rapidly desalted on G-25 gel filtration column, from which it was eluted into a conjugation buffer containing 50 mM NaPi/150 mM NaCl/1 mM EDTA/0.01% Tween-80, pH 7.4. Biotinylation reactions were initiated by the addition of a 10-fold molar excess of stock Biotin-HPDP. The final concentration of dimethylformamide (DMF) was maintained below 2-3%.

[0724] Reactions were carried out for 4 hours at 25° C. and the reaction progress followed using release of the pyridine-2-thione leaving group at 343 nm. Excess biotinylation reagent was removed by extensive dialysis against a storage buffer containing 50 mM NaPi/300 mM NaCl/1 mM EDTA, pH 6.2. The PAI-1 concentration was confirmed using an extinction coefficient of 0.93 mL mg⁻¹ cm⁻¹ as des (Kvassman, J.-O., and Shore, J. D. (1995) Fibrinolysis 9, 215-221). The extent of biotinylation was typically 1.0-1.2 moles of biotin per mole of PAI-1 variant using the EZ-Quant HABA/Avidn kit and the release of pyridin-2-thione (PIERCE, Rockford, Ill. #28005).

### Example 17

### Screening of MT-SP1 Variants from E. coli Culture Supernatants and Periplasmic Extracts

[0725] This Example describes two methods, each used as an alternative to screening the activity of MT-SP1 variants on phage by assaying either the protein from the E. coli periplasmic space or the protein from E. coli cell culture medium.

[0726] For both methods, 1 mL cultures were prepared as follows. 1 mL of 2YT medium supplemented with 100 ug/mL Carbenicillin and 12 ug/mL Tetracycline were dispensed into each well of a 96 well deep well plate, and inoculated with 10 μL of XL-1 Blue cells that had been infected with MT-SP1 protease domain-bearing phage overnight as described in Example 14 above, from a 96 well master plate. The deep well plate was sealed with an air-permeable membrane and placed in a HiGro shaker incubator with shaking at 400 rpm at 37° C. with oxygen aeration until the cell density reached 0.4-0.6 OD600 (usually 4-5 hours of shaking). At that point IPTG was added to a final concentration of 0.5 mM, and growth with shaking was continued overnight. The following day, the plate was centrifuged at 3600 rpm for 20 min to pellet the cells.

### A. SCREENING OF MT-SP1 VARIANTS FROM PREIPLASMIC PREPS

[0727] The methods in this example were used to assay the full length MT-SP 1-gene III fusion proteins, and enzymatically active cleavage products of the fusion proteins, that had been transported into the E. coli periplasmic space. After the centrifugation at 3600 rpm, the culture supernatant was discarded and the cell pellet was used to release periplasmic proteins using either of the following conditions: Condition 1: The cell pellets were resuspended in 150 μL cold phosphate buffered saline (PBS); the suspension was transferred a 96 well PCR plate; followed by one step freeze thawing (20 min at −80° C./10 min in a room temperature water bath); or Condition 2: The cell pellets were resuspended in 150 uL of 3% BugBuster Protein Extraction Reagent (Novagen); the suspension was transferred to a 96 well PCR plate; and the suspension was incubated at room temperature for 30 min. Next, the cell suspensions were centrifuged for 20 min at 3600 rpm at 4° C. and the supernatants containing periplasmic proteins were carefully removed without disturbing the pellet. Further, the periplasmic extracts were used to determine enzyme activity of the MT-SP 1 variants using appropriate substrates as described in Example 10, Section B.

### B. SCREENING OF MT-SP1 VARIANTS FROM SUPERNATANT PREPS

[0728] The methods in this example were used to assay the full length MT-SP 1-gene III fusion proteins, and catalytically active fragments of the fusion protein, that had diffused from the periplasm and into the bacterial cell culture media. In this example, after centrifugation in the 1 mL culture, 10 μL of the culture supernatant were removed and assayed using the protease assay described in Example 10, Section B, except an additional 25 μL of assay buffer was added to the reaction.

[0729] Since modifications will be apparent to those of skill in this art, it is intended that this invention be limited only by the scope of the appended claims.

1. A method, comprising:
a) contacting a collection of proteases and/or catalytically active portions of proteases with a protease trap polypeptide to form, upon cleavage of the protease trap polypeptide by the protease or catalytically active portion thereof, stable complexes containing the protease trap polypeptide with a protease or catalytically active portion thereof in the collection; and
b) identifying or selecting a protease or catalytically active portion thereof in a complex.

2. The method of claim 1, wherein the protease trap polypeptide is modified to be cleaved by a protease having a predetermined substrate specificity and/or activity for a target substrate.

3. The method of claim 2, wherein:
the identified or selected proteases are modified compared to a template protease; and
the identified or selected proteases have an altered activity and/or specificity towards the target substrate compared to the template protease not containing the modification(s).

4. The method of claim 1, further comprising separating the complexed proteases from uncomplexed members of the collection.

5. The method of claim 1, wherein the protease trap polypeptide and a protease in the complex are covalently linked.

6. The method of claim 1, wherein:
the protease trap polypeptide is labeled for detection or separation; and
separation is effected by capture of complexes containing the detectable protease trap polypeptide with any protease or catalytically active portion thereof.

7. The method of claim 6, wherein capture is effected in suspension, solution or on a solid support.

8. The method of claim 7, wherein:
the protease trap polypeptide is attached to a solid support; and
attachment is effected before, during or subsequent to contact of the protease trap polypeptide with the collection of proteases or catalytically active portions thereof.

9. The method of claim 8, wherein the solid support is a well of an enzyme-linked immunosorbent assay (ELISA) plate.

10. The method of claim 6, wherein the protease trap polypeptide is labeled with biotin.

11. The method of claim 6, wherein:
the protease trap is labeled with a His tag; and
separation is effected by capture with a metal chelating agent.

12. The method of claim 11, wherein the metal chelating agent is selected from among nickel sulphate (NiSO4), cobalt chloride (CoCl2), copper sulphate (CuSO4) and zinc chloride (ZnCl2).

13. The method of claim 1, further comprising amplifying the protease or catalytically active portion thereof in the separated complexes.

14. The method of claim 13, wherein the protease or catalytically active portion thereof in the separated complex is displayed on a phage, and amplification is effected by infecting a host cell with the phage.

15. The method of claim 14, wherein the host cell is bacteria.

16. The method of claim 14, further comprising screening the amplified protease for specificity and/or activity towards a target substrate, wherein specificity and/or activity is assessed on bacterial cell medium, bacterial periplasm, phage supernatant or on purified protein.

17. The method of claim 16, wherein the target substrate is a polypeptide or a cleavage sequence in a polypeptide involved in the etiology of a disease or disorder.

18. The method of claim 1 that is multiplexed, wherein:
a plurality of different protease trap polypeptides are contacted with the collection; and
at least two protease trap polypeptides can be identifiably detected, whereby more than one protease is identified.

19. The method of claim 1, wherein proteases or catalytically active portions thereof in the complexes are displayed, whereby they can be amplified following identification or selection to produce a second collection of proteases and/or catalytically active portions thereof.

20. The method of claim 19, further comprising contacting the second collection with a second protease trap polypeptide to produce a second set of stable complexes.

21. The method of claim 20, wherein the second protease trap polypeptide is the same or different from the first protease trap polypeptide.

22. The method of claim 20, further comprising identifying or selecting proteases in the second set of stable complexes.

23. The method of claim 1, wherein the protease trap polypeptide is selected from among a serpin, a member of the alpha macroglobulin family, or a member of the p35 family.

24. The method of claim 4, wherein the stable complex comprises a protease trap polypeptide covalently linked to a protease or catalytically active portion thereof.

25. A method for screening proteases to identify any proteases that have a predetermined substrate specificity, comprising:
a) contacting a collection of proteases and/or catalytically active portions of proteases with a protease trap polypeptide to form stable complexes of the protease trap polypeptide with a protease upon cleavage of the protease trap polypeptide, wherein the protease trap polypeptide is selected or modified to be cleaved by a protease having the predetermined substrate specificity; and
b) identifying a protease or catalytically active portion of a protease in a complex to thereby select a protease having predetermined substrate specificity.

26. The method of claim 1, wherein the collection contains at least 5, 10, 50, 100, 500, 10³, 10⁴, 10⁵, 10⁶ or more different members.

27. The method of claim 1, where the proteases or catalytically active portions thereof are serine and/or cysteine proteases.

28. The method of claim 1, wherein the proteases or catalytically active portions thereof are displayed.

29. The method of claim 28, wherein the protease or catalytically active portions thereof are displayed on a solid support, on a cell surface, or on the surface of a microorganism.

30. The method of claim 29, wherein the protease or catalytically active portion thereof are displayed on the surface of a yeast, bacterium, a virus, a phage, a nucleic acid, an mRNA molecules or on ribosomes.

31. The method of claim 29, wherein the microorganism is E. coli, S. cerevisiae, or a virus selected from among M113, fd, T7, or a baculovirus.

32. The method of claim 1 that is a homogeneous reaction.

33. The method of claim 28, wherein the proteases or catalytically active portions thereof are displayed in a phage display library.

34. The method of claim 1, wherein the proteases are provided as catalytically active portions of a protease.

35. The method of claim 1, wherein:
at least two different protease trap polypeptides are contacted with the collection; and
at least one of the protease trap polypeptides is detectably labeled.

36. The method of claim 35, wherein at least one protease trap polypeptide is detectable to effect capture of stable complexes containing the detectable protease trap polypeptide with a protease or catalytically active portion thereof.

37. The method of claim 35, wherein:
at least two different protease trap polypeptides are contacted with the collection;
only one protease trap polypeptide is detectably labeled; and
the other or others are each present in excesses compared to the detectably labeled protease trap polypeptide.

38. The method of claim 35, wherein the detectable label is a fluorescent label or a His tag.

39. The method of claim 35, wherein the detectable label is biotin.

40. The method of claim 1, wherein the proteases or catalytically active portions thereof are selected from among the chymotrypsin, subtilisin, caspases and the papain families of proteases.

41. The method of claim 1, wherein the protease is a serine protease, cysteine protease, or catalytically active portion thereof and is selected from among granzyme B, testisin, trypstase beta 1, kallikrein hk5, corin, kallikrein 12, DESC1 oritesase, trypstase gamma 1, kallikrein hK14, hyaluronan-binding serine protease, tryptase, kallikrein hK15, trypsin, neutrophil elastase, mannan-binding lectin-associated serine protease-3, cathepsin G, myeloblastin, granzyme A, granzyme M, chymase, granzyme K, granzyme H, chymotrypsin B, pancreatic elastase, pancreatic endopeptidase E, pancreatic elastaste II, enteropeptidase, chymotrypsin C, prostasin, kallikrein 1, kallikrein hK2, kallikrein 3, mesotrypsin, Factor XII, plasma kallikrein KLK3, factor XI, factor IX, factor VII, factor Xa, thrombin, protein C, acrosin, hepsin, hepatocyte growth factor activator, urinary plasminogen activator (uPA), tissue plasminogen activator (tPA), plasmin, neurosin, neurotrypsin, neuropsin, kallikrein hK10, epitheliasin, prostase, chymopasin, kallikrein 11, MT-SP1, spinesin, cathepsin L, cathepsin V, cathepsin K, cathepsin S, cathepsin F, cathepsin B, papain, cruzain, subtilisin, thermitase, C5a peptidase, fervidolysin, lactocepin, furin, kexin, caspase-1, caspase-3, caspase-7, caspase-6, caspase-2, caspase-4, caspase-5, caspase-8, caspase-9, caspase-10, caspase-11, caspase-12, caspase-1, caspase-13, and caspase-14.

42. The method of claim 41, wherein the proteases or catalytically active portion thereof are selected from among urokinase plasminogen activator (u-PA), tissue plasminogen activator (t-PA) and MT-SP1.

43. The method of claim 1, wherein the protease trap polypeptides are selected from among serpins, p35 family members, alpha-macroglobulin family members or modified forms thereof.

44. The method of claim 43, wherein the protease trap polypeptide is a serpin selected from plasminogen activator inhibitor-1 (PAI-1) or antithrombin III (AT3), or modified forms thereof.

45. The method of claim 43, wherein the protease trap polypeptide is alpha2-macroglobulin, or a modified form thereof.

46. The method of claim 43, wherein the modified form contains one or more amino acid replacements, deletions, or substitutions in the reactive site of the protease trap polypeptide.

47. The method of claim 46, wherein the modification is any one or more amino acid replacements corresponding to a cleavage sequence of a target substrate.

48. The method of claim 47, wherein the target substrate is involved in the etiology of a disease or disorder.

49. The method of claim 47, wherein the target substrate is a VEGFR, a complement protein, or a substrate of tissue plasminogen activator (tPA).

50. The method of claim 49, wherein the VEGFR is VEGFR2.

51. The method of claim 49, wherein the complement protein is C2.

52. The method of claim 47, wherein the one or more amino acid modifications corresponding to a cleavage sequence has a sequence of amino acids set forth in any of SEQ ID NOS: 389, 479 and 498.

53. The method of claim 46, wherein the protease trap polypeptide is a serpin and the one or more amino acid replacements is/are in the reactive site loop of the serpin polypeptide.

54. The method of claim 53, wherein the one or more amino acid replacements are in any one or more of the P4-P2′ positions.

55. The method of claim 54, wherein the serpin has a sequence of amino acids set forth in any of SEQ ID NOS: 497, 499, 610 and 611.

56. The method of claim 46, wherein the protease trap polypeptide is alpha 2 macroglobulin, and the one or more amino acid replacements are in the bait region of the polypeptide.

57. The method of claim 48, wherein the identified or selected protease or catalytically active portion thereof has altered substrate specificity for the target substrate compared with a non-target substrate.

58. The method of claim 57, wherein the non-target substrate is a substrate of the corresponding template protease.

59. The method of claim 57, wherein the substrate specificity is increased by 1.5-fold, 2-fold, 5-fold, 10-fold, 50-fold, 100-fold, 200-fold, 300-fold, 400-fold, 500-fold or more.

60. The method of claim 1, wherein the method of identifying proteases is performed a plurality of times, whereby the process is iterative.

61. The method of claim 60, wherein the method is performed until the protease exhibits increased substrate specificity and/or activity for a cleavage sequence in a target substrate as compared to a non-target substrate of the corresponding template protease.

62. The method of claim 60, wherein a plurality of different proteases are identified at least in the first iteration of the method.

63. The method of claim 60, further comprising comparing the amino acid sequences of the identified proteases to identify hot spots, wherein:
a hot spot is a modified locus that occurs in at least two, three, four, five or more of the identified proteases; and
a modified locus is one that is modified if the collection contains modified proteases or catalytically active portions thereof.

64. The method of claim 2, further comprising:
after identifying a first protease or proteases, preparing a second collection of proteases, wherein an identified first protease is used as a template to make further mutations in the protease sequence or catalytically active portion thereof such that members of the second collection contain polypeptides having mutations of the identified first proteases and additional mutations;
then contacting the second collection with a second protease trap polypeptide that is either identical or different from the first protease trap polypeptide used to isolate the first protease or proteases, wherein the protease trap polypeptide is modified to be cleaved by a protease having the desired target substrate specificity; and
identifying a second protease(s) or catalytically active portion(s) of a protease from the collection in a complex, whereby the second identified protease(s) has greater activity or specificity towards the target substrate than the first identified protease.

65. The method of claim 64, wherein the second collection of proteases contains random or focused mutations as compared to the sequence of amino acids of the first identified template protease(s) or catalytically active portion of a protease.

66. The method of claim 65, wherein the mutations are focused mutations at hot spot positions.

67. The method of claim 66, wherein the hot spot positions are in a serine protease and are selected from among positions 30, 73, 89 and 155, based on chymotrypsin numbering.

68. The method of claim 1, wherein the formation of stable complexes is modulated by controlling one or more parameters selected from among reaction time, temperature, pH, ionic strength, library concentration and protease trap polypeptide concentration.

69. The method of claim 1, wherein the method further comprises adding a competitor to the reaction between a protease trap polypeptide and a protease or catalytically active portion thereof to thereby enhance selectivity of identified protease(s) or catalytically active portion(s).

70. The method of claim 69, wherein the competitor is human serum or plasma.

71. The method of claim 69, wherein the competitor is a cell or tissue extract or a biological fluid such as urine or blood.

72. The method of claim 69, wherein the competitor is a purified or partially purified wild type form of the protease trap.

73. The method of claim 69, wherein the competitor is a purified or partially purified wild-type form of a protease trap polypeptide or one or more specific variants of a protease trap polypeptide.

74. The method of claim 69, wherein the competitor is human plasma.

75. The method of claim 69, wherein the competitor is a purified wild-type form of the protease trap polypeptide or is a protease trap polypeptide that is a modified protease trap polypeptide.

76. An iterative method for evolving or selecting or identifying a protease or catalytically active portion thereof with specificity/selectivity and/or activity for at least two different cleavage sequences, comprising:
a) contacting a collection of proteases and/or catalytically active portions of proteases with a first protease trap polypeptide to form, upon cleavage of the protease trap polypeptide by the protease or catalytically active portion thereof, stable complexes containing the first protease trap polypeptide with a protease or catalytically active portion thereof in the collection, wherein contacting is effected in the presence of a competitor;
b) identifying or selecting proteases or catalytically active portions thereof that form complexes with the first protease trap polypeptide;
c) contacting proteases or catalytically active portion thereof that form complexes with the first protease trap polypeptide with a second protease trap polypeptide in the presence of a competitor; and
d) identifying or selecting proteases or catalytically active portions thereof that form complexes with the second protease trap polypeptide,
whereby the identified, evolved or selected protease or catalytically active portion thereof has substrate specificity and/or cleavage activity for at least two cleavage sequences.

77. The method of claim 76, wherein the at least two cleavage sequences are in one target substrate.

78. The method of claim 76, wherein the at least two cleavage sequences are in two different target substrates.

79. The method of claim 76, wherein the first and second protease trap polypeptide are different and each is modified to be cleaved by a protease having the desired substrate specificity for a different target substrate.

80. The method of claim 76, further comprising repeating steps a) and b) or a)-d) at least once more until an identified or selected protease with a predetermined substrate specificity and/or cleavage activity to at least two cleavage sequences is isolated.

81. The method of claim 76, wherein the collection of proteases comprise amino acid mutations in positions corresponding to a template protease.

82. The method of claim 81, wherein the substrate specificity and/or cleavage activity is increased compared with the corresponding template protease.

83. The method of claim 80, wherein the substrate specificity for at least one cleavage sequence is increased compared to the corresponding template protease.

84. The method of claim 76, wherein the competitor is selected from among human serum, human plasma, a cell or tissue extract, a biological fluid such as urine or blood, a purified or partially purified wild-type form of the protease trap, and one or more specific variants of a protease trap polypeptide.

85. A method of protease selection, comprising:
a) contacting a collection of proteases or catalytically active portions thereof with a first protease trap polypeptide to form, upon cleavage of the protease trap polypeptide, covalent complexes of the protease trap polypeptide with any protease or catalytically active portion thereof in the collection;
b) separating the complexed proteases from uncomplexed protease trap polypeptide(s);
c) isolating or selecting or identifying the complexed proteases;
d) generating a second collection of proteases or catalytically active portions of proteases based on the selected proteases; and
e) repeating steps a)-c) by contacting the second collection of proteases or catalytically active portions thereof with a second protease trap polypeptide that is different from the first protease trap polypeptide to form complexes; separating the complexes; and isolating, selecting or identifying complexed proteases.

86. The method of claim 85, wherein the first and second protease trap polypeptides are modified to contain two different target substrate cleavage sequences, whereby the identified or selected protease has specificity and high cleavage activity to at least two cleavage sequences.

87. The method of claim 85 that is repeated a plurality of times.

88. The method of claim 85, wherein a collection of proteases or catalytically active portions thereof is contacted with the first and/or second protease trap polypeptide in the presence of a competitor.

89. The method of claim 88, wherein the competitor is selected from among human serum, human plasma, a cell or tissue extract, a biological fluid such as urine or blood, a purified or partially purified wild-type form of the protease trap polypeptide, and one or more specific variants of a protease trap polypeptide.

90. The method of claim 1, wherein the collections contain modified proteases.

91. The method of claim 90, wherein the modifications are random or focused or in a target region.

92. The method of claim 2, further comprising screening the complexes for substrate specificity for the cleavage sequence of the target substrate.

93. A combination, comprising;
a collection of proteases and/or catalytically active portions thereof; and
at least one protease trap polypeptide.

94. The combination of claim 93, wherein the protease trap polypeptide is selected from among serpins, p35 family members, alpha-macroglobulin family members, or modified forms thereof.

95. The combination of claim 93, wherein the collection of proteases and/or catalytically active portions thereof are provided in a display library.

96. The combination of claim 95, wherein the display library is a phage display library and members display at least a catalytically active portion of a protease.

97. A kit, comprising the combination of any of claims 93-96, wherein each component is separately packaged.

98. A method of modifying the substrate specificity of a serine protease, comprising modifying one or more of residues selected from among 30, 73, 89 and 155 based on chymotrypsin numbering.

99. The method of claim 98, wherein the serine protease is uPA.

100. A modified protease,
wherein the protease or catalytically active fragment thereof is of the chymotrypsin family of serine proteases; and
contains one or more mutations in any of positions corresponding to positions 30, 73, 89, and 155, based on chymotrypsin numbering, whereby substrate specificity is altered.

101. The modified protease of claim 100, wherein the protease is a modified urinary plasminogen activator (u-PA) polypeptide or catalytically active fragment thereof.

102. A modified urinary plasminogen activator (u-PA) polypeptide, comprising one or more amino acid modifications corresponding to amino acid positions in a u-PA polypeptide set forth in SEQ ID NO:433, wherein:
the one or more amino acid modifications increase one or both of specificity for a target substrate or activity towards a target substrate; and
the target substrate is involved in the etiology of a disease or disorder.

103. The modified urinary plasminogen activator (u-PA) polypeptide of claim 102, wherein the target substrate is a VEGFR or a tissue plasminogen activator (t-PA) substrate.

104. The modified urinary plasminogen activator (u-PA) polypeptide of claim 103, wherein the u-PA polypeptide or catalytically active portion thereof contains one or more modifications in positions corresponding to positions selected from among positions 21, 24, 30, 39, 61 (A), 80, 82, 84, 89, 92, 156, 158, 159, and 187 in a u-PA polypeptide set forth in SEQ ID NO:433, based on chymotrypsin numbering, whereby substrate specificity to a t-PA substrate, or sequence thereof, is altered.

105. The modified u-PA polypeptide of claim 104, wherein the u-PA polypeptide or catalytically active portion thereof contains one or more modifications selected from among F21V, 124L, F30V, F30L, T39A, Y61(A)H, E80G, K82E, E84K, I89V, K92E, K156T, T158A, V159A, and K187E.

106. The modified u-PA polypeptide of claim 105, wherein the u-PA polypeptide or catalytically active portion thereof contains modifications selected from among F21V; I24L; F30V; F30L; F30V/Y61(a)H; F30V/K82E; F30V/K156T; F30V/K82E/V159A; F30V/K82E/T39A/V159A; F30V/K82E/T158A/V159A; F30V/Y61(a)H/K92E; F30V/K82E/V159A/E80G/I89V/K187E; and F30V/K82E/V159A/E80G/E84K/I89V/K187E.

107. The modified urinary plasminogen activator (u-PA) polypeptide of claim 103, wherein the u-PA polypeptide or catalytically active portion thereof contains one or more modifications in positions corresponding to positions selected from among positions 38, 72, 73, 75, 132, 133, 137, 138, 155, 160, and 217 in a u-PA polypeptide set forth in SEQ ID NO:433, based on chymotrypsin numbering, whereby substrate specificity to a VEGFR-2, or sequence thereof, is altered.

108. The modified u-PA polypeptide of claim 107, wherein the u-PA polypeptide or catalytically active portion thereof contains one or more modifications selected from among V38D, R72G, L73A, L73P, S75P, F132L, G133D, E137G, I138T, L155P, L155V, L155M, V160A, and R217C.

109. The modified u-PA polypeptide of claim 107, wherein the u-PA polypeptide or catalytically active portion thereof further comprises a modification at position 30 and/or position 89, based on chymotrypsin numbering.

110. The modified u-PA polypeptide of claim 109, wherein the further modification in the u-PA polypeptide or catalytically active portion thereof is selected from among F301, F30T, F30L, F30V, F30G, F30M, and I89V.

111. The modified u-PA polypeptide of claim 110, wherein the u-PA polypeptide or catalytically active portion thereof contains modifications selected from among L73A/I89V; S75P/I89V/I138T; R72G/L155P; F132L/V160A; L73A/I89V/F30T; L73A/I89V/F30L; L73A/I89V/F30V; L73A/I89V/F30G; L73A/I89V/L155V; L73A/I89V/F30M; L73A/I89V/L155M; L73A/I89V/F30L/L155M; and L73A/I89V/F30G/L155M.

112. The modified u-PA polypeptide of claim 103, wherein the u-PA polypeptide or catalytically active portion thereof contains one or more modifications corresponding to mutations selected from among F30I, F30T, F30G, and F30M in a u-PA polypeptide set forth in SEQ ID NO:433, based on chymotrypsin numbering, whereby substrate specificity to a VEGFR-2, or sequence thereof, is altered.

113. The modified u-PA polypeptide of claim 102, wherein:
the u-PA polypeptide has 80%, 85%, 90%, 91%, 92%, 93%, 94%, 95%, 96%, 97%, 98%, 99% or more sequence identity with a wild-type u-PA polypeptide set forth in SEQ ID NO:433, or an allelic or species variant thereof; and
the polypeptide includes the one or more modifications.

114. A modified MT-SP1 polypeptide or catalytically active portion thereof, comprising one or more amino acid modifications selected from among D23E, I41F, I41T, L52M, Y60(g)s, T65K, H71R, F93L, N95K, F97Y, F97L, T98P, F99L, A126T, V129D, P131S, I136T, I136V, H143R, T144I, I154V, N164D, T166A, L171F, P173S, F184(a)L, Q192H, S201I, Q209L, Q221(a)L, R230W, F234L, and V244G, based on chymotrypsin numbering, in an MT-SP1 polypeptide set forth in SEQ ID NO:253.

115. The modified MT-SP1 polypeptide of claim 114, wherein the modifications are in a catalytically active portion of an MT-SP1 having a sequence of amino acids set forth in SEQ ID NO: 505.

116. The modified MT-SP1 polypeptide of claim 114, wherein the modifications are in an MT-SP1 polypeptide further comprising a modification corresponding to modification of C122S in an MT-SP 1 polypeptide set forth in SEQ ID NO:253, based on chymotrypsin numbering.

117. The modified MT-SP1 polypeptide of claim 116, wherein the modifications are in an MT-SP1 polypeptide having a sequence of amino acids set forth in SEQ ID NO: 507 or 517.

118. The modified MT-SP1 polypeptide of claim 114, wherein the amino acid modifications are selected from among I41F, F97Y, L171F and V244G.

119. The modified MT-SP1 polypeptide of claim 114, further comprising one or more modifications corresponding to modifications Q175R or D217V in an MT-SP1 polypeptide set forth in SEQ ID NO:253.

120. The modified MT-SP1 polypeptide of claim 119, wherein the amino acid modifications are selected from among I136T/N164D/T166A/F184(A)L/D217V; H143R/Q175R; H71R/P131S/D217V; and T65K/F93L/F97Y/D217V.

121. The modified MT-SP I polypeptide of claim 114, wherein the modifications increase one or both of specificity for a C2 complement protein or activity towards C2 complement protein.

122. The modified MT-SP1 polypeptide of claim 114, wherein:
the MT-SP1 polypeptide has 80%, 85%, 90%, 91%, 92%, 93%, 94%, 95%, 96%, 97%, 98%, 99% or more sequence identity with a wild-type MT-SP1 polypeptide set forth in SEQ ID NO:253, or a catalytically active portion thereof set forth in SEQ ID NO:505, or an allelic or species variant thereof; and
the polypeptide includes the one or more modifications.

123. A pharmaceutical composition, comprising a modified u-PA polypeptide of claim 102.

124. A pharmaceutical composition, comprising a modified u-PA polypeptide of claim 104.

125. A pharmaceutical composition, comprising a modified u-PA polypeptide of claim 107.

126. A pharmaceutical composition, comprising a modified MT-SP1 polypeptide of claim 114.

127. The pharmaceutical composition of any of claims 123-126, further comprising a pharmaceutically acceptable excipient.

128. The pharmaceutical composition of claim 127, wherein the pharmaceutical composition is formulated for systemic, oral, nasal, pulmonary, local, or topical administration.

129. A kit, comprising the pharmaceutical composition of any one of claims 123-126, a device for administration of the composition and, optionally, instructions for administration.

130. A nucleic acid molecule, comprising a sequence of nucleotides that encodes any one of the modified u-PA proteases of claim 102.

131. A nucleic acid molecule, comprising a sequence of nucleotides that encodes any one of the modified MT-SP I proteases of claim 114.

132. A vector, comprising the nucleic acid molecule of claim 130 or claim 131.

133. A cell, comprising the vector of claim 132.

134. A method of treatment, comprising treating a subject by administering a pharmaceutical composition of claim 124, wherein the subject has a disease or condition that is treated by administration of t-PA.

135. The method of claim 134, wherein the disease or condition is selected from among arterial thrombosis, venous thrombosis and thromboembolism, ischemic stroke, acquired coagulation disorders, disseminated intravascular coagulation, bacterial infection and periodontitis, and neurological conditions.

136. The method of claim 135, wherein the disease or conditions is thrombosis that obstructs a catheter.

137. A method of treatment, comprising treating a subject by administering a pharmaceutical composition of claim 125, wherein the subject has a disease or condition that is mediated by VEGFR-2.

138. The method of claim 137, wherein the disease or condition to be treated is an angiogenic disease.

139. The method of claim 138, wherein the angiogenic disease is selected from among cancer, macular degeneration, inflammation, and diabetes.

140. The method of claim 139, further comprising administering another anti-tumor agent.

141. A method of treatment, comprising treating a subject by administering a pharmaceutical composition of claim 126, wherein the subject has a disease or condition that is mediated by complement protein C2.

142. The method of claim 141, wherein the disease or condition selected from among autoimmune diseases, sepsis, Rheumatoid arthritis (RA), membranoproliferative glomerulonephritis (MPGN), Multiple Sclerosis (MS), Myasthenia gravis (MG), asthma, inflammatory bowel disease, immune complex (IC)-mediated acute inflammatory tissue injury, Alzheimer's Disease (AD), Ischemia-reperfusion injury, macular degeneration, rejection of a transplanted organ and Guillan-Barre syndrome.

143. The method claim 142, wherein the ischemia-reperfusion injury is caused by an event or treatment selected from among myocardial infarct (MI), stroke, angioplasty, coronary artery bypass graft, cardiopulmonary bypass (CPB), and hemodialysis.

144. The method of claims 141, wherein the disease or condition results from a treatment of a subject.

145. The method of claim 144, wherein administering a modified MT-SP1 is effected prior to treatment of a subject.

146. The method of claim 141, wherein administering a modified MT-SP1 is effected by contacting a body fluid or tissue sample in vitro, ex vivo, or in vivo with a modified MT-SP1.

147. The method of claim 144, wherein the treatment results in complement-mediated ischemia-reperfusion injury.

148. The method of claim 147, wherein the treatment is angioplasty or coronary artery bypass graft.

149. A modified serpin polypeptide, comprising modifications in its reactive site loop corresponding to any one or more of position P4-P2′ with a cleavage sequence for a target substrate.

150. The modified serpin polypeptide of claim 149, wherein the target substrate is involved in the etiology of a disease or disorder.

151. The modified serpin polypeptide of claim 149, wherein the target substrate is selected from among a VEGFR, a complement protein or a t-PA substrate.

152. The modified serpin polypeptide of claim 151, wherein the target substrate is a VEGFR2.

153. The modified serpin polypeptide of claim 151, wherein the complement protein is C2.

154. The modified serpin polypeptide of claim 149, wherein the serpin is plasminogen-activator inhibitor-1 (PAI-1) or antithrombin-3 (AT3).

155. The modified serpin polypeptide of claim 154 having a sequence of amino acids set forth in any of SEQ ID NOS: 497, 499, 610 and 611.

156. The method of claim 1, wherein the protease is human kallikrein 8.

157. A method, comprising:
a) contacting a collection of proteases and/or catalytically active portions of proteases with a protease trap polypeptide to form, upon cleavage of the protease trap polypeptide by the protease or catalytically active portion thereof, stable complexes containing the protease trap polypeptide with a protease or catalytically active portion thereof in the collection; and
b) identifying or selecting a protease or catalytically active portion thereof in a complex, wherein the collection contains 2 different members.

158. The modified MT-SP1 polypeptide of claim 114, wherein the amino acid modifications are selected from among I41F/A126T/V244G; D23E/I41F/T98P/T144I; I41F/L171F/V244G; I41F/L171F; I41F/I154V/V244G; I41F/L52M/V129D/Q221(A)L; F97Y/I136V/Q192H/S201I; I41T/P173S/Q209L; and F97L/F234L.

The application's sequence listing, which the Patent Office published only in electronic form, follows.

SEQUENCE LISTING (636 sequences)

SEQ ID NO: 1 - protein, 418 aa, Homo sapiens
  Alpha-1-antitrypsin precursor SERPINA1
MPSSVSWGILLLAGLCCLVPVSLAEDPQGDAAQKTDTSHHDQDHPTFNKITPNLAEFAFSLYRQLAHQSNSTNIFFSPVSIATAFAMLSLGTKADTHDEILEGLNFNLTEIPEAQIHEGFQELLRTLNQPDSQLQLTTGNGLFLSEGLKLVDKFLEDVKKLYHSEAFTVNFGDTEEAKKQINDYVEKGTQGKIVDLVKELDRDTVFALVNYIFFKGKWERPFEVKDTEEEDFHVDQVTTVKVPMMKRLGMFNIQHCKKLSSWVLLMKYLGNATAIFFLPDEGKLQHLENELTHDIITKFLENEDRRSASLHLPKLSITGTYDLKSVLGQLGITKVFSNGADLSGVTEEAPLKLSKAVHKAVLTIDEKGTEAAGAMFLEAIPMSIPPEVKFNKPFVFLMIEQNTKSPLFMGKVVNPTQK

SEQ ID NO: 2 - protein, 420 aa, Homo sapiens
  Alpha-1-antitrypsin-related precursor SERPINA2
MPFSVSWGVLLLAGLCCLVPSSLVEDPQGDAAQKTDTSHHDQGDWEDLACQKISYNVTDLAFDLYKSWLIYHNQHVLVTPTSVAMAFRMLSLGTKADTRTEILEGLNVNLTETPEAKIHECFQQVLQALSRPDTRLQLTTGSSLFVNKSMKLVDTFLEDTKKLYHSEASSINFRDTEEAKEQINNYVEKRTGRKVVDLVKHLKKDTSLALVDYISFHGKWKDKFKAERIMVEGFHVDDKTIIRVPMINHLGRFDIHRDRELSSWVLAQHYVGNATAFFILPDPKKMWQLEEKLTYSHLENIQRAFDIRSINLHFPKLSISGTYKLKRVPRNLGITKIFSNEADLSGVSQEAPLKLSKAVHVAVLTIDEKGTEATGAPHLEEKAWSKYQTVMFNRPFLVIIKEYITNFPLFIGKVVNPTQK

SEQ ID NO: 3 - protein, 490 aa, Homo sapiens
  Alpha-2-antiplasmin SERPINF2
MALLWGLLVLSWSCLQGPCSVFSPVSAMEPLGRQLTSGPNQEQVSPLTLLKLGNQEPGGQTALKSPPGVCSRDPTPEQTHRLARAMMAFTADLFSLVAQTSTCPNLILSPLSVALALSHLALGAQNHTLQRLQQVLHAGSGPCLPHLLSRLCQDLGPGAFRLAARMYLQKGFPIKEDFLEQSEQLFGAKPVSLTGKQEDDLANINQWVKEATEGKIQEFLSGLPEDTVLLLLNAIHFQGFWRNKFDPSLTQRDSFHLDEQFTVPVEMMQARTYPLRWFLLEQPEIQVAHFPFKNNMSFVVLVPTHFEWNVSQVLANLSWDTLHPPLVWERPTKVRLPKLYLKHQMDLVATLSQLGLQELFQAPDLRGISEQSLVVSGVQHQSTLELSEVGVEAAAATSIAMSRMSLSSFSVNRPFLFFIFEDTTGLPLFVGSVRNPNPSAPRELKEQQDSPGNKDFLQSLKGFPRGDKLFGPDLKLVPPMEEDYPQFGSP

SEQ ID NO: 4 - protein, 423 aa, Homo sapiens
  Alpha-1-antichymotrypsin precursor SERPINA3
MERMLPLLALGLLAAGFCPAVLCHPNSPLDEENLTQENQDRGTHVDLGLASANVDFAFSLYKQLVLKAPDKNVIFSPLSISTALAFLSLGAHNTTLTEILKGLKFNLTETSEAEIHQSFQHLLRTLNQSSDELQLSMGNAMFVKEQLSLLDRFTEDAKRLYGSEAFATDFQDSAAAKKLINDYVKNGTRGKITDLIKDLDSQTMMVLVNYIFFKAKWEMPFDPQDTHQSRFYLSKKKWVMVPMMSLHHLTIPYFRDEELSCTVVELKYTGNASALFILPDQDKMEEVEAMLLPETLKRWRDSLEFREIGELYLPKFSISRDYNLNDILLQLGIEEAFTSKADLSGITGARNLAVSQVVHKAVLDVFEEGTEASAATAVKITLLSALVETRTIVRFNRPFLMIIVPTDTQNIFFMSKVTNPKQA

SEQ ID NO: 5 - protein, 464 aa, Homo sapiens
  Antithrombin-III precursor   SERPINC1
MYSNVIGTVTSGKRKVYLLSLLLIGFWDCVTCHGSPVDICTAKPRDIPMNPMCIYRSPEKKATEDEGSEQKIPEATNRRVWELSKANSRFATTFYQHLADSKNDNDNIFLSPLSISTAFAMTKLGACNDTLQQLMEVFKFDTISEKTSDQIHFFFAKLNCRLYRKANKSSKLVSANRLFGDKSLTFNETYQDISELVYGAKLQPLDFKENAEQSRAAINKWVSNKTEGRITDVIPSEAINELTVLVLVNTIYFKGLWKSKFSPENTRKELFYKADGESCSASMMYQEGKFRYRRVAEGTQVLELPFKGDDITMVLILPKPEKSLAKVEKELTPEVLQEWLDELEEMMLVVHMPRFRIEDGFSLKEQLQDMGLVDLFSPEKSKLPGIVAEGRDDLYVSDAFHKAFLEVNEEGSEAAASTAVVIAGRSLNPNRVTFKANRPFLVFIREVPLNTIIFMGRVANPCVK

SEQ ID NO: 6 - protein, 499 aa, Homo sapiens
  Heparin cofactor 2 precursor   SERPIND1
MKHSLNALLIFLIITSAWGGSKGPLDQLEKGGETAQSADPQWEQLNNKNLSMPLLPADFHKENTVTNDWIPEGEEDDDYLDLEKIFSEDDDYIDIVDSLSVSPTDSDVSAGNILQLFHGKSRIQRLNILNAKFAFNLYRVLKDQVNTFDNIFIAPVGISTAMGMISLGLKGETHEQVHSILHFKDFVNASSKYEITTIHNLFRKLTHRLFRRNFGYTLRSVNDLYIQKQFPILLDFKTKVREYYFAEAQIADFSDPAFISKTNNHIMKLTKGLIKDALENIDPATQMMILNCIYFKGSWVNKFPVEMTHNHNFRLNEREVVKVSMMQTKGNFLAANDQELDCDILQLEYVGGISMLIVVPHKMSGMKTLEAQLTPRVVERWQKSMTNRTREVLLPKFKLEKNYNLVESLKLMGIRMLFDKNGNMAGISDQRIAIDLFKHQGTITVNEEGTQATTVTTVGFMPLSTQVRFTVDRPFLFLIYEHRTSCLLFMGRVANPSRS

SEQ ID NO: 7 - protein, 500 aa, Homo sapiens
  Plasma protease C1 inhibitor precursor   SERPING1
MASRLTLLTLLLLLLAGDRASSNPNATSSSSQDPESLQDRGEGKVATTVISKMLFVEPILEVSSLPTTNSTTNSATKITANTTDEPTTQPTTEPTTQPTIQPTQPTTQLPTDSPTQPTTGSFCPGPVTLCSDLESHSTEAVLGDALVDFSLKLYHAFSAMKKVETNMAFSPFSIASLLTQVLLGAGENTKTNLESILSYPKDFTCVHQALKGFTTKGVTSVSQIFHSPDLAIRDTFVNASRTLYSSSPRVLSNNSDANLELINTWVAKNTNNKISRLLDSLPSDTRLVLLNAIYLSAKWKTTFDPKKTRMEPFHFKNSVIKVPMMNSKKYPVAHFIDQTLKAKVGQLQLSHNLSLVILVPQNLKHRLEDMEQALSPSVFKAIMEKLEMSKFQPTLLTLPRIKVTTSQDMLSIMEKLEFFDFSYDLNLCGLTEDPDLQVSAMQHQTVLELTETGVEAAAASAISVARTLLVFEVQQPFLFVLWDQQHKFPVFMGRVYDPRA

SEQ ID NO: 8 - protein, 406 aa, Homo sapiens
  Plasma serine protease inhibitor precursor SERPINA5
MQLFLLLCLVLLSPQGASLHRHHPREMKKRVEDLHVGATVAPSSRRDFTFDLYRALASAAPSQNIFFSPVSISMSLAMLSLGAGSSTKMQILEGLGLNLQKSSEKELHRGFQQLLQELNQPRDGFQLSLGNALFTDLVVDLQDTFVSAMKTLYLADTFPTNFRDSAGAMKQINDYVAKQTKGKIVDLLKNLDSNAVVIMVNYIFFKAKWETSFNHKGTQEQDFYVTSETVVRVPMMSREDQYHYLLDRNLSCRVVGVPYQGNATALFILPSEGKMQQVENGLSEKTLRKWLKMFKKRQLELYLPKFSIEGSYQLEKVLPSLGISNVFTSHADLSGISNHSNIQVSEMVHKAVVEVDESGTRAAAATGTIFTFRSARLNSQRLVFNRPFLMFIVDNNILFLGKVNRP

SEQ ID NO: 9 - protein, 427 aa, Homo sapiens
  Kallistatin precursor    SERPINA4
MHLIDYLLLLLVGLLALSHGQLHVEHDGESCSNSSHQQILETGEGSPSLKIAPANADFAFRFYYLIASETPGKNIFFSPLSISAAYAMLSLGACSHSRSQILEGLGFNLTELSESDVHRGFQHLLHTLNLPGHGLETRVGSALFLSHNLKFLAKFLNDTMAVYEAKLFHTNFYDTVGTIQLINDHVKKETRGKIVDLVSELKKDVLMVLVNYIYFKALWEKPFISSRTTPKDFYVDENTTVRVPMMLQDQEHHWYLHDRYLPCSVLRMDYKGDATVFFILPNQGKMREIEEVLTPEMLMRWNNLLRKRNFYKKLELHLPKFSISGSYVLDQILPRLGFTDLFSKWADLSGITKQQKLEASKSFHKATLDVDEAGTEAAAATSFAIKFFSAQTNRHILRFNRPFLVVIFSTSTQSVLFLGKVVDPTKP

SEQ ID NO: 10 - protein, 410 aa, Homo sapiens
  Neuroserpin precursor   SERPINII
MAFLGLFSLLVLQSMATGATFPEEAIADLSVNMYNRLRATGEDENILFSPLSIALAMGMMELGAQGSTQKEIRHSMGYDSLKNGEEFSFLKEFSNMVTAKESQYVMKIANSLFVQNGFHVNEEFLQMMKKYFNAAVNHVDFSQNVAVANYINKWVENNTNNLVKDLVSPRDFDAATYLALINAVYFKGNWKSQFRPENTRTFSFTKDDESEVQIPMMYQQGEFYYGEFSDGSNEAGGIYQVLEIPYEGDEISMMLVLSRQEVPLATLEPLVKAQLVEEWANSVKKQKVEVYLPRFTVEQEIDLKDVLKALGITEIFIKDANLTGLSDNKEIFLSKAIHKSFLEVNEEGSEAAAVSGMIAISRMAVLYPQVIVDHPFFFLIRNRRTGTILFMGRVMHPETMNTSGHDFEEL

SEQ ID NO: 11 - protein, 402 aa, Homo sapiens [sequence omitted]

SEQ ID NO: 12 - protein, 405 aa, Homo sapiens
  Myoepithelium-derived serine protease inhibitor SERPIN12
MDTIFLWSLLLLFFGSQASRCSAQKNTEFAVDLYQEVSLSHKDNIIFSPLGITLVLEMVQLGAKGKAQQQIRQTLKQQETSAGEEFFVLKSFFSAISEKKQEFTFNLANALYLQEGFTVKEQYLHGNKEFFQSAIKLVDFQDAKACAEMISTWVERKTDGKIKDMFSGEEFGPLTRLVLVNAIYFKGDWKQKFRKEDTQLINFTKKNGSTVKIPMMKALLRTKYGYFSESSLNYQVLELSYKGDEFSLIIILPAEGMDIEEVEKLITAQQILKWLSEMQEEEVEISLPRFKVEQKVDFKDVLYSLNITEIFSGGCDLSGITDSSEVYVSQVTQKVFFEINEDGSEAATSTGIHIPVIMSLAQSQFIANHPFLFIMKHNPTESILFMGRVTNPDTQEIKGRDLDSL

SEQ ID NO: 13 - protein, 444 aa, Homo sapiens
  Protein Z-dependent protease inhibitor precursor SERPINA10
MKVVPSLLLSVLLAQVWLVPGLAPSPQSPETPAPQNQTSRVVQAPKEEEEDEQEASEEKASEEEKAWLMASRQQLAKETSNFGFSLLRKISMRHDGNMVFSPFGMSLAMTGLMLGATGPTETQIKRGLHLQALKPTKPGLLPSLFKGLRETLSRNLELGLTQGSFAFIHKDFDVKETFFNLSKRYFDTECVPMNFRNASQAKRLMNHYINKETRGKIPKLFDEINPETKLILVDYILFKGKWLTPFDPVFTEVDTFHLDKYKTIKVPMMYGAGKFASTFDKNFRCHVLKLPYQGNATMLVVLMEKMGDHLALEDYLTTDLVETWLRNMKTRNMEVFFPKFKLDQKYEMHELLRQMGIRRIFSPFADLSELSATGRNLQVSRVLQRTVIEVDERGTEAVAGILSEITAYSMPPVIKVDRPFHFMIYEETSGMLLFLGRVVNPTLL

SEQ ID NO: 14 - protein, 398 aa, Homo sapiens
  Glia-derived nexin precursor   SERPINE2
MNWHLPLFLLASVTLPSICSHFNPLSLEELGSNTGIQVFNQIVKSRPHDNIVISPHGIASVLGMLQLGADGRTKKQLAMVMRYGVNGVGKILKKINKAIVSKKNKDIVTVANAVFVKNASEIEVPFVTRNKDVFQCEVRNVNFEDPASACDSINAWVKNETRDMIDNLLSPDLIDGVLTRLVLVNAVYFKGLWKSRFQPENTKKRTFVAADGKSYQVPMLAQLSVFRCGSTSAPNDLWYNFIELPYHGESISMLIALPTESSTPLSAIIPHISTKTIDSWMSIMVPKRVQVILPKFTAVAQTDLKEPLKVLGITDMFDSSKANFAKITTGSENLHVSHILQKAKIEVSEDGTKASAATTAILIARSSPPWFIVDRPFLFFIRHNPTGAVLFMGQINKP

SEQ ID NO: 15 - protein, 379 aa, Homo sapiens
  Leukocyte elastase inhibitor    SERPINB1
MEQLSSANTRFALDLFLALSENNPAGNIFISPFSISSAMAMVFLGTRGNTAAQLSKTFHFNTVEEVHSRFQSLNADINKRGASYILKLANRLYGEKTYNFLPEFLVSTQKTYGADLASVDFQHASEDARKTINQWVKGQTEGKIPELLASGMVDNMTKLVLVNAIYFKGNWKDKFMKEATTNAPFRLNKKDRKTVKMMYQKKKFAYGYIEDLKCRVLELPYQGEELSMVILLPDDIEDESTGLKKIEEQLTLEKLHEWTKPENLDFIEVNVSLPRFKLEESYTLNSDLARLGVQDLFNSSKADLSGMSGARDIFISKIVHKSFVEVNEEGTEAAAATAGIATFCMLMPEENFTADHPFLFFIRHNSSGSILFLGRFSSP

SEQ ID NO: 16 - protein, 415 aa, Homo sapiens
  Plasminogen activator inhibitor 2 precursor SERPINB2
MEDLCVANTLFALNLFKHLAKASPTQNLFLSPWSISSTMAMVYMGSRGSTEDQMAKVLQFNEVGANAVTPMTPENFTSCGFMQQIQKGSYPDAILQAQAADKIHSSFRSLSSAINASTGNYLLESVNKLFGEKSASFREEYIRLCQKYYSSEPQAVDFLECAEEARKKINSWVKTQTKGKIPNLLPEGSVDGDTRMVLVNAVYFKGKWKTPFEKKLNGLYPFRVNSAQRTPVQMMYLREKLNIGYIEDLKAQILELPYAGDVSMFLLLPDEIADVSTGLELLESEITYDKLNKWTSKDKMAEDEVEVYIPQFKLEEHYELRSILRSMGMEDAFNKGRANFSGMSERNDLFLSEVFHQAMVDVNEEGTEAAAGTGGVMTGRTGHGGPQFVADHPFLFLIMHKITNCILFFGRFSSP

SEQ ID NO: 17 - protein, 376 aa, Homo sapiens
  Placental thrombin inhibitor   SERPINB6
MDVLAEANGTFALNLLKTLGKDNSKNVFFSPMSMSCALAMVYMGAKGNTAAQMAQILSFNKSGGGGDIHQGFQSLLTEVNKTGTQYLLRVANRLFGEKSCDFLSSFRDSCQKFYQAEMEELDFISAVEKSRKHINTWVAEKTEGKIAELLSPGSVDPLTRLVLVNAVYFRGNWDEQFDKENTEERLFKVSKNEEKPVQMMFKQSTFKKTYIGEIFTQILVLPYVGKELNMIIMLPDETTDLRTVEKELTYEKFVEWTRLDMMDEEEVEVSLPRFKLEESYDMESVLRNLGMTDAFELGKADFSGMSQTDLSLSKVVHKSFVEVNEEGTEAAAATAAIMMMRCARFVPRFCADHPFLFFIQHSKTNGILFCGRFSSP

SEQ ID NO: 18 - protein, 397 aa, Homo sapiens
  Bomapin   SERPINB10
MDSLATSINQFALELSKKLAESAQGKNIFFSSWSISTSLTIVYLGAKGTTAAQMAQVLQFNRDQGVKCDPESEKKRKMEFNLSNSEEIHSDFQTLISEILKPNDDYLLKTANAIYGEKTYAFHNKYLEDMKTYFGAEPQPVNFVEASDQIRKDINSWVERQTEGKIQNLLPDDSVDSTTRMILVNALYFKGIWEHQFLVQNTTEKPFRINETTSKPVQMMFMKKKLHIFHIEKPKAVGLQLYYKSRDLSLLILLPEDINGLEQLEKAITYEKLNEWTSADMMELYEVQLHLPKFKLEDSYDLKSTLSSMGMSDAFSQSKADFSGMSSARNLFLSNVFHKAFVEINEQGTEAAAGSGSEIDIRIRVPSIEFNANHPFLFFIRHNKTNTILFYGRLCSP

SEQ ID NO: 19 - protein, 392 aa, Homo sapiens [sequence omitted]

SEQ ID NO: 20 - protein, 405 aa, Homo sapiens
  Yukopin   SERPINB12
MDSLVTANTKFCFDLFQEIGKDDRHKNIFFSPLSLSAALGMVRLGARSDSAHQIDEVLHFNEFSQNESKEPDPCLKSNKQKAGSLNNESGLVSCYFGQLLSKLDRIKTDYTLSIANRLYGEQEFPICQEYLDGVIQFYHTTIESVDFQKNPEKSRQEINFWVECQSQGKIKELFSKDAINAETVLVLVNAVYFKAKWETYFDHENTVDAPFCLNANENKSVKMMTQKGLYRIGFIEEVKAQILEMRYTKGKLSMFVLLPSHSKDNLKGLEELERKITYEKMVAWSSSENMSEESVVLSFPRFTLEDSYDLNSILQDMGITDIFDETRADLTGISPSPNLYLSKIIHKTFVEVDENGTQAAAATGAVVSERSLRSWVEFNANHPFLFFIRHNKTQTILFYGRVCSP

SEQ ID NO: 21 - protein, 391 aa, Homo sapiens
  Headpin   SERPINB13
MDSLGAVSTRLGFDLFKELKKTNDGNIFFSPVGILTAIGMVLLGTRGATASQLEEVFHSEKETKSSRIKAEEKEVIENTEAVHQQFQKFLTEISKLTNDYELNITNRLFGEKTYLFLQKYLDYVEKYYHASLEPVDFVNAADESRKKINSWVESKTNEKIKDLFPDGSISSSTKLVLVNMVYFKGQWDREFKKENTKEEKFWMNKSTSKSVQMMTQSHSFSFTFLEDLQAKILGIPYKNNDLSMFVLLPNDIDGLEKIIDKISPEKLVEWTSPGHMEERKVNLHLPRFEVEDGYDLEAVLAAMGMGDAFSEHKADYSGMSSGSGLYAQKFLHSSFVAVTEEGTEAAAATGIGFTVTSAPGHENVHCNHPFLFFIRHNESNSILFFGRFSSP

SEQ ID NO: 22 - protein, 390 aa, Homo sapiens
  Squamous cell carcinoma antigen 1   SERPINB3
MNSLSEANTKFMFDLFQQFRKSKENNIFYSPISITSALGMVLLGAKDNTAQQIKKVLHFDQVTENTTGKAATYHVDRSGNVHHQFQKLLTEFNKSTDAYELKIANKLFGEKTYLFLQEYLDAIKKFYQTSVESVDFANAPEESRKKINSWVESQTNEKIKNLIPEGNIGSNTTLVLVNAIYFKGQWEKKFNKEDTKEEKFWPNKNTYKSIQMMRQYTSFHFASLEDVQAKVLEIPYKGKDLSMIVLLPNEIDGLQKLEEKLTAEKLMEWTSLQNMRETRVDLHLPRFKVEESYDLKDTLRTMGMVDIFNGDADLSGMTGSRGLVLSGVLHKAFVEVTEEGAEAAAATAVVGFGSSPTSTNEEFHCNHPFLFFIRQNKTNSILFYGRFSSP

SEQ ID NO: 23 - protein, 390 aa, Homo sapiens
  Squamous cell carcinoma antigen 2  SERPINB4
MNSLSEANTKFMFDLFQQFRKSKENNIFYSPISITSALGMVLLGAKDNTAQQISKVLHFDQVTENTTEKAATYHVDRSGNVHHQFQKLLTEFNKSTDAYELKIANKLFGEKTYQFLQEYLDAIKKFYQTSVESTDFANAPEESRKKINSWVESQTNEKIKNLFPDGTIGNDTTLVLVNAIYFKGQWENKFKKENTKEEKFWPNKNTYKSVQMMRQYNSFNFALLEDVQAKVLEIPYKGKDLSMIVLLPNEIDGLQKLEEKLTAEKLMEWTSLQNMRETCVDLHLPRFKMEESYDLKDTLRTMGMVNIFNGDADLSGMTWSHGLSVSKVLHKAFVEVTEEGVEAAAATAVVVVELSSPSTNEEFCCNHPFLFFIRQNKTNSILFYGRFSSP

SEQ ID NO: 24 - protein, 380 aa, Homo sapiens
  Megsin  SERPINB7
MASLAAANAEFCFNLFREMDDNQGNGNVFFSSLSLFAALALVRLGAQDDSLSQIDKLLHVNTASGYGNSSNSQSGLQSQLKRVFSDINASHKDYDLSIVNGLFAEKVYGFHKDYIECAEKLYDAKVERVDFTNHLEDTRRNINKWVENETHGKIKNVIGEGGISSSAVMVLVNAVYFKGKWQSAFTKSETINCHFKSPKCSGKAVAMMHQERKFNLSVIEDPSMKILELRYNGGINMYVLLPENDLSEIENKLTFQNLMEWTNPRRMTSKYVEVFFPQFKIEKNYEMKQYLRALGLKDIFDESKADLSGIASGGRLYISRMMHKSYIEVTEEGTEATAATGSNIVEKQLPQSTLFRADHPFLFVIRKDDIILFSGKVSCP

SEQ ID NO: 25 - protein, 374 aa, Homo sapiens
  Cytoplasmic antiproteinase 2   SERPINB8
MDDLCEANGTFAISLFKILGEEDNSRNVFFSPMSISSALAMVFMGAKGSTAAQMSQALCLYKDGDIHRGFQSLLSEVNRTGTQYLLRTANRLFGEKTCDFLPDFKEYCQKFYQAELEELSFAEDTEECRKHINDWVAEKTEGKISEVLDAGTVDPLTKLVLVNAIYFKGKWNEQFDRKYTRGMLFKTNEEKKTVQMMFKEAKFKMGYADEVHTQVLELPYVEEELSMVILLPDDNTDLAVVEKALTYEKFKAWTNSEKLTKSKVQVFLPRLKLEESYDLEPFLRRLGMIDAFDEAKADFSGMSTEKNVPLSKVAHKCFVEVNEEGTEAAAATAVVRNSRCSRMEPRFCADHPFLFFIRRHKTNCILFCGRFSSP

SEQ ID NO: 26 - protein, 376 aa, Homo sapiens
  Cytoplasmic antiproteinase 3   SERPINB9
METLSNASGTFAIRLLKILCQDNPSHNVFCSPVSISSALAMVLLGAKGNTATQMAQALSLNTEEDIHRAFQSLLTEVNKAGTQYLLRTANRLFGEKTCQFLSTFKESCLQFYHAELKELSFIRAAEESRKHINTWVSKKTEGKIEELLPGSSIDAETRLVLVNAIYFKGKWNEPFDETYTREMPFKINQEEQRPVQMMYQEATFKLAHVGEVRAQLLELPYARKELSLLVLLPDDGVELSTVEKSLTFEKLTAWTKPDCMKSTEVEVLLPKFKLQEDYDMESVLRHLGIVDAFQQGKADLSAMSAERDLCLSKFVHKSFVEVNEEGTEAAAASSCFVVAECCMESGPRFCADHPFLFFIRHNRANSILFCGRFSSP

SEQ ID NO: 27 - protein, 376 aa, Homo sapiens; identical to SEQ ID NO: 17
  Placental thrombin inhibitor  SERPINB6

SEQ ID NO: 28 - protein, 485 aa, Homo sapiens
  Angiotensinogen precursor   SERPINA8
MRKRAPQSEMAPAGVSLRATILCLLAWAGLAAGDRVYIHPFHLVIHNESTCEQLAKANAGKPKDPTFIPAPIQAKTSPVDEKALQDQLVLVAAKLDTEDKLRAAMVGMLANFLGFRIYGMHSELWGVVHGATVLSPTAVFGTLASLYLGALDHTADRLQAILGVPWKDKNCTSRLDAHKVLSALQAVQGLLVAQGRADSQAQLLLSTVVGVFTAPGLHLKQPFVQGLALYTPVVLPRSLDFTELDVAAEKIDRFMQAVTGWKTGCSLMGASVDSTLAFNTYVHFQGKMKGFSLLAEPQEFWVDNSTSVSVPMLSGMGTFQHWSDIQDNFSVTQVPFTESACLLLIQPHYASDLDKVEGLTFQQNSLNWMKKLSPRTIHLTMPQLVLQGSYDLQDLLAQAELPAILHTELNLQKLSNDRIRVGEVLNSIFFELEADEREPTESTQQLNKPEVLEVTLNRPFLFAVYDQSATALHFLGRVANPLSTA

SEQ ID NO: 29 - protein, 405 aa, Homo sapiens
  Corticosteroid-binding globulin precursor SERPINA6
MPLLLYTCLLWLPTSGLWTVQAMDPNAAYVNMSNHHRGLASANVDFAFSLYKHLVALSPKKNIFISPVSISMALAMLSLGTCGHTRAQLLQGLGFNLTERSETEIHQGFQHLHQLFAKSDTSLEMTMGNALFLDGSLELLESFSADIKHYYESEVLAMNFQDWATASRQINSYVKNKTQGKIVDLFSGLDSPAILVLVNYIFFKGTWTQPFDLASTREENFYVDETTVVKVPMMLQSSTISYLHDSELPCQLVQMNYVGNGTVFFILPDKGKMNTVIAALSRDTINRWSAGLTSSQVDLYIPKVTISGVYDLGDVLEEMGIADLFTNQANFSRITQDAQLKSSKVVHKAVLQLNEEGVDTAGSTGVTLNLTSKPIILRFNQPFIIMIFDHFTWSSLFLARVMNPV

SEQ ID NO: 30 - protein, 417 aa, Homo sapiens
  47 kDa heat shock protein precursor   SERPINH1
MRSLLLGTLCLLAVALAAEVKKPVEAAAPGTAEKLSSKATTLAEPSTGLAFSLYQAMAKDQAVENILVSPVVVASSLGLVSLGGKATTASQAKAVLSAEQLRDEEVHAGLGELLRSLSNSTARNVTWKLGSRLYGPSSVSFADDFVRSSKQHYNCEHSKINFPDKRSALQSINEWAAQTTDGKLPEVTKDVERTDGALLVNAMFFKPHWDEKFHHKMVDNRGFMVTRSYTVGVTMMHRTGLYNYYDDEKEKLQLVEMPLAHKLSSLIILMPHHVEPLERLEKLLTKEQLKIWMGKMQKKAVAISLPKGVVEVTHDLQKHLAGLGLTEAIDKNKADLSRMSGKKDLYLASVFHATAFELDTDGNPFDQDIYGREELRSPKLFYADHPFIFLVRDTQSGSLLFIGRLVRLKGDKMRDEL

SEQ ID NO: 31 - protein, 418 aa, Homo sapiens [sequence omitted]

SEQ ID NO: 32 - protein, 375 aa, Homo sapiens
  Maspin   SERPINB5
MDALQLANSAFAVDLFKQLCEKEPLGNVLFSPICLSTSLSLAQVGAKGDTANEIGQVLHFENVKDIPFGFQTVTSDVNKLSSFYSLKLIKRLYVDKSLNLSTEFISSTKRPYAKELETVDFKDKLEETKGQINNSIKDLTDGHFENILADNSVNDQTKILVVNAAYFVGKWMKKFPESETKECPFRLNKTDTKPVQMMNMEATFCMGNIDSINCKIIELPFQNKHLSMFILLPKDVEDESTGLEKIEKQLNSESLSQWTNPSTMANAKVKLSIPKFKVEKMIDPKACLENLGLKHIFSEDTSDFSGMSETKGVALSNVIHKVCLEITEDGGDSIEVPGARILQHKDELNADHPFIYIIRHNKTRNIIFFGKFCSP

SEQ ID NO: 33 - protein, 418 aa, Homo sapiens
  Collagen-binding protein 2 precursor   SERPINH2
MRSLLLLSAFCLLEAALAAEVKKPAAAAAPGTAEKLSPKAATLAERSAGLAFSLYQAMAKDQAVENILVSPVVVASSLGLVSLGGKATTASQAKAVLSAEQLRDEEVHAGLGELLRSLSNSTARNVTWKLGSRLYGPSSVSFADDFVRSSKQHYNCEHSKINFRDKRSALQSINEWAAQTTDGKLPEVTKDVERTDGALLVNAMFFKPHWDEKFHHKMVDNRGFMVTRSYTVGVMMMHRTGLYNYYDDEKEKLQIVEMPLAHKLSSLIILMPHHVEPLERLEKLLTKEQLKIWMGKMQKKAVAISLPKGVVEVTHDLQKHLAGLGLTEAIDKNKADLSRMSGKKDLYLASVFHATAFELDTDGNPFDQDIYGREELRSPKLFYADHPFIFLVRDTQSGSLLFIGRLVRPKGDKMRDEL

SEQ ID NO: 34 - protein, 415 aa, Homo sapiens
  Thyroxine-binding globulin precursor   SERPINA7
MSPFLYLVLLVLGLHATIHCASPEGKVTACHSSQPNATLYKMSSINADFAFNLYRRFTVETPDKNIFFSPVSISAALVMLSFGACCSTQTEIVETLGFNLTDTPMVEIQHGFQHLICSLNFPKKELELQIGNALFIGKHLKPLAKFLNDVKTLYETEVFSTDFSNISAAKQEINSHVEMQTKGKVVGLIQDLKPNTIMVLVNYIHFKAQWANPFDPSKTEDSSSFLIDKTTTVQVPMMHQMEQYYHLVDMELNCTVLQMDYSKNALALFVLPKEGQMESVEAAMSSKTLKKWNRLLQKGWVDLFVPKFSISATYDLGATLLKMGIQHAYSENADFSGLTEDNGLKLSNAAHKAVLHIGEKGTEAAAVPEVELSDQPENTFLHPIIQIDRSFMLLILERSTRSILFLGKVVNPTEA

SEQ ID NO: 35 - protein, 417 aa, Homo sapiens [sequence omitted]

SEQ ID NO: 36 - protein, 414 aa, Homo sapiens
  Vaspin  SERPINA12
MNPTLGLAIFLAVLLTVKGLLKPSFSPRNYKALSEVQGWKQRMAAKELARQNMDLGFKLLKKLAFYNPGRNIFLSPLSISTAFSMLCLGAQDSTLDEIKQGFNFRKMPEKDLHEGFHYIIHELTQKTQDLKLSIGNTLFIDQRLQPQRKFLEDAKNFYSAETILTNFQNLEMAQKQINDFISQKTHGKINNLIENIDPGTVMLLANYIFFRARWKHEFDPNVTKEEDFFLEKNSSVKVPMMFRSGIYQVGYDDKLSCTILEIPYQKNITAIFILPDEGKLKHLEKGLQVDTFSRWKTLLSRRVVDVSVPRLHMTGTFDLKKTLSYIGVSKIFEEHGDLTKIAPHRSLKVGEAVHKAELKMDERGTEGAAGTGAQTLPMETPLVVKIDKPYLLLIYSEKIPSVLFLGKIVNPIGK

SEQ ID NO: 37 - protein, 422 aa, Homo sapiens
  Serpin A11 precursor   SERPINA11
MGPAWLWLLGTGILASVHCQPLLAHGDKSLQGPQPPRHQLSEPAPAYHRITPTITNFALRLYKELAADAPGNIFFSPVSISTTLALLSLGAQANTSALILEGLGFNLTETPEADIHQGFRSLLHTLALPSPKLELKVGNSLFLDKRLKPRQHYLDSIKELYGAFAFSANFTDSVTTGRQINDYLRRQTYGQVVDCLPEFSQDTFMVLANYIFFKAKWKHPFSRYQTQKQESFFVDERTSLQVPMMHQKEMHRFLYDQDLACTVLQIEYRGNALALLVLPDPGKMKQVEAALQPQTLRKWGQLLLPSLLDLHLPRFSISGTYNLEDILPQIGLTNILNLEADFSGVTGQLNKTISKVSHKAMVDMSEKGTEAGAASGLLSQPPSLNTMSDPHAHFNRPFLLLLWEVTTQSLLFLGKVVNPVAG

SEQ ID NO: 38 - protein, 307 aa, Homo sapiens
  Serpin A13 precursor   SERPINA13
MEASRWWLLVTVLMAGAHCVALVDQEASDLIHSGPQDSSPGPALPCHKISVSNIDFAFKLYRQLALNAPGENILFFPVSISLALAMLSWGAPVASRTQLLEGLGFTLTVVPEEEIQEGFWDLLIRLRGQGPRLLLTMDQRRFSGLGARANQSLEEAQKHIDEYTEQQTQGKLGAWEKDLGSETTAVLVNHMLLRAEWMKPFDSHATSPKEFFVDEHSAVWVPMMKEKASHRFLHDRELQCSVLRMDHAGNTTTFFIFPNRGKMRHLEDALLPETLIKWDSLLRTRELDFHFPKFSISRTCRLEMLLP

SEQ ID NO: 39 - DNA, 934 bp, Homo sapiens
  granzyme B
tgagaagatgcaaccaatcctgcttctgctggccttcctcctgctgcccagggcagatgcaggggagatcatcgggggacatgaggccaagccccactcccgcccctacatggcttatcttatgatctgggatcagaagtctctgaagaggtgcggtggcttcctgatacaagacgacttcgtgctgacagctgctcactgttggggaagctccataaatgtcaccttgggggcccacaatatcaaagaacaggagccgacccagcagtttatccctgtgaaaagacccatcccccatccagcctataatcctaagaacttctccaacgacatcatgctactgcagctggagagaaaggccaagcggaccagagctgtgcagcccctcaggctacctagcaacaaggcccaggtgaagccagggcagacatgcagtgtggccggctgggggcagacggcccccctgggaaaacactcacacacactacaagaggtgaagatgacagtgcaggaagatcgaaagtgcgaatctgacttacgccattattacgacagtaccattgagttgtgcgtgggggacccagagattaaaaagacttcctttaagggggactctggaggccctcttgtgtgtaacaaggtggcccagggcattgtctcctatggacgaaacaatggcatgcctccacgagcctgcaccaaagtctcaagctttgtacactggataaagaaaaccatgaaacgctactaactacaggaagcaaactaagcccccgctgtaatgaaacaccttctctggagccaagtccagatttacactgggagaggtgccagcaactgaataaatacctctcccagtgtaaatctggagccaagtccagatttacactgggagaggtgccagcaactgaataaatacctcttagctgagtgg

SEQ ID NO: 40 - protein, 247 aa, Homo sapiens
  granzyme B
MQPILLLLAFLLLPRADAGEIIGGHEAKPHSRPYMAYLMIWDQKSLKRCGGFLIQDDFVLTAAHCWGSSINVTLGAHNIKEQEPTQQFIPVKRPIPHPAYNPKNFSNDIMLLQLERKAKRTRAVQPLRLPSNKAQVKPGQTCSVAGWGQTAPLGKHSHTLQEVKMTVQEDRKCESDLRHYYDSTIELCVGDPEIKKTSFKGDSGGPLVCNKVAQGIVSYGRNNGMPPRACTKVSSFVHWIKKTMKRY

SEQ ID NO: 41 - DNA, 1165 bp, Homo sapiens
  Testisin transcript variant 1
gctgggagtagagggcagagctcccaccccgccccgcccccagggggcgccccgggcccggcgcgagaggaggcagagggggcgtcaggccgcgggagaggaggccatgggcgcgcgcggggcgctgctgctggcgctgctgctggctcgggctggactcaggaagccggagtcgcaggaggcggcgccgttatcaggaccatgcggccgacgggtcatcacgtcgcgcatcgtgggtggagaggacgccgaactcgggcgttggccgtggcaggggagcctgcgcctgtgggattcccacgtatgcggagtgagcctgctcagccaccgctgggcactcacggcggcgcactgctttgaaacctatagtgaccttagtgatccctccgggtggatggtccagtttggccagctgacttccatgccatccttctggagcctgcaggcctactacacccgttacttcgtatcgaatatctatctgagccctcgctacctggggaattcaccctatgacattgccttggtgaagctgtctgcacctgtcacctacactaaacacatccagcccatctgtctccaggcctccacatttgagtttgagaaccggacagactgctgggtgactggctgggggtacatcaaagaggatgaggcactgccatctccccacaccctccaggaagttcaggtcgccatcataaacaactctatgtgcaaccacctcttcctcaagtacagtttccgcaaggacatctttggagacatggtttgtgctggcaatgcccaaggcgggaaggatgcctgcttcggtgactcaggtggacccttggcctgtaacaagaatggactgtggtatcagattggagtcgtgagctggggagtgggctgtggtcggcccaatcggcccggtgtctacaccaatatcagccaccactttgagtggatccagaagctgatggcccagagtggcatgtcccagccagacccctcctggccgctactctttttccctcttctctgggctctcccactcctggggccggtctgagcctacctgagcccatgcagcctggggccactgccaagtcaggccctggttctcttctgtcttgtttggtaataaacacattccagttgatgccttgcagggcattcttcaaaa

SEQ ID NO: 42 - protein, 314 aa, Homo sapiens
  Testisin isoform 1
MGARGALLLALLLARAGLRKPESQEAAPLSGPCGRRVITSRIVGGEDAELGRWPWQGSLRLWDSHVCGVSLLSHRWALTAAHCFETYSDLSDPSGWMVQFGQLTSMPSFWSLQAYYTRYFVSNIYLSPRYLGNSPYDIALVKLSAPVTYTKHIQPICLQASTFEFENRTDCWVTGWGYIKEDEALPSPHTLQEVQVAIINNSMCNHLFLKYSFRKDIFGDMVCAGNAQGGKDACFGDSGGPLACNKNGLWYQIGVVSWGVGCGRPNRPGVYTNISHHFEWIQKLMAQSGMSQPDPSWPLLFFPLLWALPLLGPV

SEQ ID NO: 43 - DNA, 1159 bp, Homo sapiens
  Testisin transcript variant 2
gctgggagtagagggcagagctcccaccccgccccgcccccagggggcgccccgggcccggcgcgagaggaggcagagggggcgtcaggccgcgggagaggaggccatgggcgcgcgcggggcgctgctgctggcgctgctgctggctcgggctggactcaggaagccggagtcgcaggaggcggcgccgttatcaggaccatgcggccgacgggtcatcacgtcgcgcatcgtgggtggagaggacgccgaactcgggcgttggccgtggcaggggagcctgcgcctgtgggattcccacgtatgcggagtgagcctgctcagccaccgctgggcactcacggcggcgcactgctttgaaactgaccttagtgatccctccgggtggatggtccagtttggccagctgacttccatgccatccttctggagcctgcaggcctactacacccgttacttcgtatcgaatatctatctgagccctcgctacctggggaattcaccctatgacattgccttggtgaagctgtctgcacctgtcacctacactaaacacatccagcccatctgtctccaggcctccacatttgagtttgagaaccggacagactgctgggtgactggctgggggtacatcaaagaggatgaggcactgccatctccccacaccctccaggaagttcaggtcgccatcataaacaactctatgtgcaaccacctcttcctcaagtacagtttccgcaaggacatctttggagacatggtttgtgctggcaatgcccaaggcgggaaggatgcctgcttcggtgactcaggtggacccttggcctgtaacaagaatggactgtggtatcagattggagtcgtgagctggggagtgggctgtggtcggcccaatcggcccggtgtctacaccaatatcagccaccactttgagtggatccagaagctgatggcccagagtggcatgtcccagccagacccctcctggccgctactctttttccctcttctctgggctctcccactcctggggccggtctgagcctacctgagcccatgcagcctggggccactgccaagtcaggccctggttctcttctgtcttgtttggtaataaacacattccagttgatgccttgcagggcattcttcaaaa

SEQ ID NO: 44 - protein, 312 aa, Homo sapiens
  Testisin isoform 2
MGARGALLLALLLARAGLRKPESQEAAPLSGPCGRRVITSRIVGGEDAELGRWPWQGSLRLWDSHVCGVSLLSHRWALTAAHCFETDLSDPSGWMVQFGQLTSMPSFWSLQAYYTRYFVSNIYLSPRYLGNSPYDIALVKLSAPVTYTKHIQPICLQASTFEFENRTDCWVTGWGYIKEDEALPSPHTLQEVQVAIINNSMCNHLFLKYSFRKDIFGDMVCAGNAQGGKDACFGDSGGPLACNKNGLWYQIGVVSWGVGCGRPNRPGVYTNISHHFEWIQKLMAQSGMSQPDPSWPLLFFPLLWALPLLGPV

SEQ ID NO: 45 - DNA, 1135 bp, Homo sapiens
  Testisin transcript variant 3
gctgggagtagagggcagagctcccaccccgccccgcccccagggggcgccccgggcccggcgcgagaggaggcagagggggcgtcaggccgcgggagaggaggccatgggcgcgcgcggggcgctgctgctggcgctgctgctggctcgggctggactcaggaagccggagtcgcaggaggcggcgccgttatcaggaccatgcggccgacgggtcatcacgtcgcgcatcgtgggtggagaggacgccgaactcgggcgttggccgtggcaggggagcctgcgcctgtgggattcccacgtatgcggagtgagcctgctcagccaccgctgggcactcacggcggcgcactgctttgaaacctatagtgaccttagtgatccctccgggtggatggtccagtttggccagctgacttccatgccatccttctggagcctgcaggcctactacacccgttacttcgtatcgaatatctatctgagccctcgctacctggggaattcaccctatgacattgccttggtgaagctgtctgcacctgtcacctacactaaacacatccagcccatctgtctccaggcctccacatttgagtttgagaaccggacagactgctgggtgactggctgggggtacatcaaagaggatgaggcactgccatctccccacaccctccaggaagttcaggtcgccatcataaacaactctatgtgcaaccacctcttcctcaagtacagtttccgcaaggacatctttggagacatgggtgactcaggtggacccttggcctgtaacaagaatggactgtggtatcagattggagtcgtgagctggggagtgggctgtggtcggcccaatcggcccggtgtctacaccaatatcagccaccactttgagtggatccagaagctgatggcccagagtggcatgtcccagccagacccctcctggccgctactctttttccctcttctctgggctctcccactcctggggccggtctgagcctacctgagcccatgcagcctggggccactgccaagtcaggccctggttctcttctgtcttgtttggtaataaacacattccagttgatgccttgcagggcattcttcaaaaaaaaaaaaaaaa

SEQ ID NO: 46 - protein, 300 aa, Homo sapiens
  Testisin isoform 3
MGARGALLLALLLARAGLRKPESQEAAPLSGPCGRRVITSRIVGGEDAELGRWPWQGSLRLWDSHVCGVSLLSHRWALTAAHCFETYSDLSDPSGWMVQFGQLTSMPSFWSLQAYYTRYFVSNIYLSPRYLGNSPYDIALVKLSAPVTYTKHIQPICLQASTFEFENRTDCWVTGWGYIKEDEALPSPHTLQEVQVAIINNSMCNHLFLKYSFRKDIFGDMGDSGGPLACNKNGLWYQIGVVSWGVGCGRPNRPGVYTNISHHFEWIQKLMAQSGMSQPDPSWPLLFFPLLWALPLLGPV

SEQ ID NO: 47 - DNA, 1194 bp, Homo sapiens
  trypstase beta 1
ataaatggggaggggagagcccactgggtagaaggaacagggagcggccaggatgctgaatctgctgctgctggcgctgcccgtcctggcgagccgcgcctacgcggcccctgccccaggccaggccctgcagcgagtgggcatcgtcgggggtcaggaggcccccaggagcaagtggccctggcaggtgagcctgagagtccacggcccatactggatgcacttctgcgggggctccctcatccacccccagtgggtgctgaccgcagcgcactgcgtgggaccggacgtcaaggatctggccgccctcagggtgcaactgcgggagcagcacctctactaccaggaccagctgctgccggtcagcaggatcatcgtgcacccacagttctacaccgcccagatcggagcggacatcgccctgctggagctggaggagccggtgaacgtctccagccacgtccacacggtcaccctgccccctgcctcagagaccttccccccggggatgccgtgctgggtcactggctggggcgatgtggacaatgatgagcgcctcccaccgccatttcctctgaagcaggtgaaggtccccataatggaaaaccacatttgtgacgcaaaataccaccttggcgcctacacgggagacgacgtccgcatcgtccgtgacgacatgctgtgtgccgggaacacccggagggactcatgccagggcgactccggagggcccctggtgtgcaaggtgaatggcacctggctgcaggcgggcgtggtcagctggggcgagggctgtgcccagcccaaccggcctggcatctacacccgtgtcacctactacttggactggatccaccactatgtccccaaaaagccgtgagtcaggcctgggttggccacctgggtcactggaggaccaacccctgctgtccaaaacaccactgcttcctacccaggtggcgactgccccccacaccttccctgccccgtcctgagtgccccttcctgtcctaagccccctgctctcttctgagccccttcccctgtcctgaggacccttccctatcctgagcccccttccctgtcctaagcctgacgcctgcaccgggccctccagccctcccctgcccagatagctggtggtgggcgctaatcctcctgagtgctggacctcattaaagtgcatggaaatca

SEQ ID NO: 48 - protein, 275 aa, Homo sapiens
  trypstase beta 1
MLNLLLLALPVLASRAYAAPAPGQALQRVGIVGGQEAPRSKWPWQVSLRVHGPYWMHFCGGSLIHPQWVLTAAHCVGPDVKDLAALRVQLREQHLYYQDQLLPVSRIIVHPQFYTAQIGADIALLELEEPVNVSSHVHTVTLPPASETFPPGMPCWVTGWGDVDNDERLPPPFPLKQVKVPIMENHICDAKYHLGAYTGDDVRIVRDDMLCAGNTRRDSCQGDSGGPLVCKVNGTWLQAGVVSWGEGCAQPNRPGIYTRVTYYLDWIHHYVPKKP

SEQ ID NO: 49 - DNA, 1528 bp, Homo sapiens
  kallikrein hk5
ggaaggcacaggcctgagaagtctgcggctgagctgggagcaaatcccccaccccctacctgggggacagggcaagtgagacctggtgagggtggctcagcaggaagggaaggagaggtgtctgtgcgtcctgcacccacatctttctctgtcccctccttgccctgtctggaggctgctagactcctatcttctgaattctatagtgcctgggtctcagcgcagtgccgatggtggcccgtccttgtggttcctctctacctggggaaataaggtgcagcggccatggctacagcaagacccccctggatgtgggtgctctgtgctctgatcacagccttgcttctgggggtcacagagcatgttctcgccaacaatgatgtttcctgtgaccacccctctaacaccgtgccctctgggagcaaccaggacctgggagctggggccggggaagacgcccggtcggatgacagcagcagccgcatcatcaatggatccgactgcgatatgcacacccagccgtggcaggccgcgctgttgctaaggcccaaccagctctactgcggggcggtgttggtgcatccacagtggctgctcacggccgcccactgcaggaagaaagttttcagagtccgtctcggccactactccctgtcaccagtttatgaatctgggcagcagatgttccagggggtcaaatccatcccccaccctggctactcccaccctggccactctaacgacctcatgctcatcaaactgaacagaagaattcgtcccactaaagatgtcagacccatcaacgtctcctctcattgtccctctgctgggacaaagtgcttggtgtctggctgggggacaaccaagagcccccaagtgcacttccctaaggtcctccagtgcttgaatatcagcgtgctaagtcagaaaaggtgcgaggatgcttacccgagacagatagatgacaccatgttctgcgccggtgacaaagcaggtagagactcctgccagggtgattctggggggcctgtggtctgcaatggctccctgcagggactcgtgtcctggggagattacccttgtgcccggcccaacagaccgggtgtctacacgaacctctgcaagttcaccaagtggatccaggaaaccatccaggccaactcctgagtcatcccaggactcagcacaccggcatccccacctgctgcagggacagccctgacactcctttcagaccctcattccttcccagagatgttgagaatgttcatctctccagcccctgaccccatgtctcctggactcagggtctgcttcccccacattgggctgaccgtgtctctctagttgaaccctgggaacaatttccaaaactgtccagggcgggggttgcgtctcaatctccctggggcactttcatcctcaagctcagggcccatcccttctctgcagctctgacccaaatttagtcccagaaataaactgagaagtggaaaaaaaaaaaaaaaaaaaaaaaaaaaaaaaaaaa

SEQ ID NO: 50 - protein, 293 aa, Homo sapiens
  kallikrein hk5
MATARPPWMWVLCALITALLLGVTEHVLANNDVSCDHPSNTVPSGSNQDLGAGAGEDARSDDSSSRIINGSDCDMHTQPWQAALLLRPNQLYCGAVLVHPQWLLTAAHCRKKVFRVRLGHYSLSPVYESGQQMFQGVKSIPHPGYSHPGHSNDLMLIKLNRRIRPTKDVRPINVSSHCPSAGTKCLVSGWGTTKSPQVHFPKVLQCLNISVLSQKRCEDAYPRQIDDTMFCAGDKAGRDSCQGDSGGPVVCNGSLQGLVSWGDYPCARPNRPGVYTNLCKFTKWIQETIQANS

SEQ ID NO: 51 - DNA, 4942 bp, Homo sapiens
  Corin
aaatcatccgtagtgcctccccgggggacacgtagaggagagaaaagcgaccaagataaaagtggacagaagaataagcgagactttttatccatgaaacagtctcctgccctcgctccggaagagcgctgccgcagagccgggtccccaaagccggtcttgagagctgatgacaataacatgggcaatggctgctctcagaagctggcgactgctaacctcctccggttcctattgctggtcctgattccatgtatctgtgctctcgttctcttgctggtgatcctgctttcctatgttggaacattacaaaaggtctattttaaatcaaatgggagtgaacctttggtcactgatggtgaaatccaagggtccgatgttattcttacaaatacaatttataaccagagcactgtggtgtctactgcacatcccgaccaacacgttccagcctggactacggatgcttctctcccaggggaccaaagtcacaggaatacaagtgcctgtatgaacatcacccacagccagtgtcagatgctgccctaccacgccacgctgacacctctcctctcagttgtcagaaacatggaaatggaaaagttcctcaagtttttcacatatctccatcgcctcagttgctatcaacatatcatgctgtttggctgtaccctcgccttccctgagtgcatcattgatggcgatgacagtcatggactcctgccctgtaggtccttctgtgaggctgcaaaagaaggctgtgaatcagtcctggggatggtgaattactcctggccggatttcctcagatgctcccagtttagaaaccaaactgaaagcagcaatgtcagcagaatttgcttctcacctcagcaggaaaacggaaagcaattgctctgtggaaggggtgagaactttctgtgtgccagtggaatctgcatccccgggaaactgcaatgtaatggctacaacgactgtgacgactggagtgacgaggctcattgcaactgcagcgagaatctgtttcactgtcacacaggcaagtgccttaattacagccttgtgtgtgatggatatgatgactgtggggatttgagtgatgagcaaaactgtgattgcaatcccacaacagagcatcgctgcggggacgggcgctgcatcgccatggagtgggtgtgtgatggtgaccacgactgtgtggataagtctgacgaggtcaactgctcctgtcacagccagggtctggtggaatgcagaaatggacaatgtatccccagcacgtttcaatgtgatggtgacgaggactgcaaggatgggagtgatgaggagaactgcagcgtcattcagacttcatgtcaagaaggagaccaaagatgcctctacaatccctgccttgattcatgtggtggtagctctctctgtgacccgaacaacagtctgaataactgtagtcaatgtgaaccaattacattggaactctgcatgaatttgccctacaacagtacaagttatccaaattattttggccacaggactcaaaaggaagcatccatcagctgggagtcttctcttttccctgcacttgttcaaaccaactgttataaatacctcatgttcttttcttgcaccattttggtaccaaaatgtgatgtgaatacaggcgagcatatccctccttgcagggcattgtgtgaacactctaaagaacgctgtgagtctgttcttgggattgtgggcctacagtggcctgaagacacagattgcagtcaatttccagaggaaaattcagacaatcaaacctgcctgatgcctgatgaatatgtggaagaatgctcacctagtcatttcaagtgccgctcaggacagtgtgttctggcttccagaagatgtgatggccaggccgactgtgacgatgacagtgatgaggaaaactgtggttgtaaagagagagatctttgggaatgtccatccaataaacaatgtttgaagcacacagtgatctgcgatgggttcccagactgccctgattacatggacgagaaaaactgctcattttgccaagatgatgagctggaatgtgcaaaccatgcgtgtgtgtcacgtgacctgtggtgtgatggtgaagccgactgctcagacagttcagatgaatgggactgtgtgaccctctctataaatgtgaactcctcttcctttctgatggttcacagagctgccacagaacaccatgtgtgtgcagatggctggcaggagatattgagtcagctggcctgcaagcagatgggtttaggagaaccatctgtgaccaaattgatacaggaacaggagaaagagccgcggtggctgacattacactccaactgggagagcctcaatgggaccactttacatgaacttctagtaaatgggcagtcttgtgagagcagaagtaaaatttctcttctgtgtactaaacaagactgtgggcgccgccctgctgcccgaatgaacaaaaggatccttggaggtcggacgagtcgccctggaaggtggccatggcagtgttctctgcagagtgaacccagtggacatatctgtggctgtgtcctcattgccaagaagtgggttctgacagttgcccactgcttcgaggggagagagaatgctgcagtttggaaagtggtgcttggcatcaacaatctagaccatccatcagtgttcatgcagacacgctttgtgaagaccatcatcctgcatccccgctacagtcgagcagtggtggactatgacatcagcatcgttgagctgagtgaagacatcagtgagactggctacgtccggcctgtctgcttgcccaacccggagcagtggctagagcctgacacgtactgctatatcacaggctggggccacatgggcaataaaatgccatttaagctgcaagagggagaggtccgcattatttctctggaacattgtcagtcctactttgacatgaagaccatcaccactcggatgatatgtgctggctatgagtctggcacagttgattcatgcatgggtgacagcggtgggcctcttgtttgtgagaagcctggaggacggtggacattatttggattaacttcatggggctccgtctgcttttccaaagtcctggggcctggcgtttatagtaatgtgtcatatttcgtcgaatggattaaaagacagatttacatccagacctttctcctaaactaattataaggatgatcagagacttttgccagctacactaaaagaaaatggccttcttgactgtgaagagctgcctgcagagagctgtacagaagcacttttcatggacagaaatgctcaatcgtgcactgcaaatttgcatgtttgttttggactaatttttttcaatttattttttcaccttcatttttctcttatttcaagttcaatgaaagactttacaaaagcaaacaaagcagactttgtccttttgccaggcctaaccatgactgcagcacaaaattatcgactctggcgagatttaaaatcaggtgctacagtaacaggttatggaatggtctcttttatcctatcacaaaaaaagacatagatatttaggctgattaattatctctaccagtttttgtttctcaagctcagtgcatagtggtaaatttcagtgttaacattggagacttgcttttctttttctttttttataccccacaattcttttttattacacttcgaattttagggtacacgagcacaacgtgcaggttagttacatatgtatacatgtgccatgttggtgtgctgaacccagtaactcgtcatttgatttattaaaagccaagataatttacatgtttaaagtatttactattacccccttctaatgtttgcataattctgagaactgataaaagacagcaataaaagaccagtgtcatccatttaggtagcaagacatattgaatgcaaagttctttagatatcaatattaacacttgacattattggaccccccattctggatgtatatcaagatcataattttatagaagagtctctatagaactgtcctcatagctgggtttgttcaggatatatgagttggctgattgagactgcaacaactacatctatatttatgggcaatattttgttttacttatgtggcaaagaactggatattaaactttgcaaaagagaatttagatgagagatgcaattttttaaaaagaaaattaatttgcatccctcgtttaattaaatttatttttcagttttcttgcgttcatccataccaacaaagtcataaagagcatattttagagcacagtaagactttgcatggagtaaaacattttgtaattttcctcaaaagatgtttaatatctggtttcttctcattggtaattaaaattttagaaatgatttttagctctaggccactttacgcaactcaatttctgaagcaattagtggtaaaaagtatttttccccactaaaaaactttaaaacacaaatcttcatatatacttaatttaattagtcaggcatccattttgccttttaaacaactaggattccctactaacctccaccagcaacctggactgcctcagcattccaaatagatactacctgcaattttatacatgtatttttgtatcttttctgtgtgtaaacatagttgaaattcaaaaagttgtagcaatttctatactattcatctcctgtccttcagtttgtataaacctaaggagagtgtgaaatccagcaactgaattgtggtcacgattgtatgaaagttcaagaacatatgtcagttttgttacagttgtagctacatactcaatgtatcaacttttagcctgctcaacttaggctcagtgaaatatatatattatacttattttaaataattcttaatacaaataaaatggtaatggtctaa

SEQ ID NO: 52 - protein, 1042 aa, Homo sapiens
  Corin
MKQSPALAPEERCRRAGSPKPVLRADDNNMGNGCSQKLATANLLRFLLLVLIPCICALVLLLVILLSYVGTLQKVYFKSNGSEPLVTDGEIQGSDVILTNTIYNQSTVVSTAHPDQHVPAWTTDASLPGDQSHRNTSACMNITHSQCQMLPYHATLTPLLSVVRNMEMEKFLKFFTYLHRLSCYQHIMLFGCTLAFPECIIDGDDSHGLLPCRSFCEAAKEGCESVLGMVNYSWPDFLRCSQFRNQTESSNVSRICFSPQQENGKQLLCGRGENFLCASGICIPGKLQCNGYNDCDDWSDEAHCNCSENLFHCHTGKCLNYSLVCDGYDDCGDLSDEQNCDCNPTTEHRCGDGRCIAMEWVCDGDHDCVDKSDEVNCSCHSQGLVECRNGQCIPSTFQCDGDEDCKDGSDEENCSVIQTSCQEGDQRCLYNPCLDSCGGSSLCDPNNSLNNCSQCEPITLELCMNLPYNSTSYPNYFGHRTQKEASISWESSLFPALVQTNCYKYLMFFSCTILVPKCDVNTGEHIPPCRALCEHSKERCESVLGIVGLQWPEDTDCSQFPEENSDNQTCLMPDEYVEECSPSHFKCRSGQCVLASRRCDGQADCDDDSDEENCGCKERDLWECPSNKQCLKHTVICDGFPDCPDYMDEKNCSFCQDDELECANHACVSRDLWCDGEADCSDSSDEWDCVTLSINVNSSSFLMVHRAATEHHVCADGWQEILSQLACKQMGLGEPSVTKLIQEQEKEPRWLTLHSNWESLNGTTLHELLVNGQSCESRSKISLLCTKQDCGRRPAARMNKRILGGRTSRPGRWPWQCSLQSEPSGHICGCVLIAKKWVLTVAHCFEGRENAAVWKVVLGINNLDHPSVFMQTRFVKTIILHPRYSRAVVDYDISIVELSEDISETGYVRPVCLPNPEQWLEPDTYCYITGWGHMGNKMPFKLQEGEVRIISLEHCQSYFDMKTITTRMICAGYESGTVDSCMGDSGGPLVCEKPGGRWTLFGLTSWGSVCFSKVLGPGVYSNVSYFVEWIKRQIYIQTFLLN

SEQ ID NO: 53 - DNA, 945 bp, Homo sapiens
  kallikrein 12 transcript variant 1
gcaggtaggtggacggagagatagcagcgacgaggacaggccaaacagtgacagccacgtagaggatctggcagacaaagagacaaggtgagaaggagactttggaagtgacccaccatggggctcagcatctttttgctcctgtgtgttcttgggctcagccaggcagccacaccgaagattttcaatggcactgagtgtgggcgtaactcacagccgtggcaggtggggctgtttgagggcaccagcctgcgctgcgggggtgtccttattgaccacaggtgggtcctcacagcggctcactgcagcggcagcaggtactgggtgcgcctgggggaacacagcctcagccagctcgactggaccgagcagatccggcacagcggcttctctgtgacccatcccggctacctgggagcctcgacgagccacgagcacgacctccggctgctgcggctgcgcctgcccgtccgcgtaaccagcagcgttcaacccctgcccctgcccaatgactgtgcaaccgctggcaccgagtgccacgtctcaggctggggcatcaccaaccacccacggaacccattcccggatctgctccagtgcctcaacctctccatcgtctcccatgccacctgccatggtgtgtatcccgggagaatcacgagcaacatggtgtgtgcaggcggcgtcccggggcaggatgcctgccagggtgattctgggggccccctggtgtgtgggggagtccttcaaggtctggtgtcctgggggtctgtggggccctgtggacaagatggcatccctggagtctacacctatatttgcaactccactcttgttggcctgggaacttcttggaactttaactcctgccagcccttctaagacccacgagcggggtgagagaagtgtgcaatagtctggaataaatataaatgaaggaggggc

SEQ ID NO: 54 - protein, 254 aa, Homo sapiens
  kallikrein 12 isoform 1
MGLSIFLLLCVLGLSQAATPKIFNGTECGRNSQPWQVGLFEGTSLRCGGVLIDHRWVLTAAHCSGSRYWVRLGEHSLSQLDWTEQIRHSGFSVTHPGYLGASTSHEHDLRLLRLRLPVRVTSSVQPLPLPNDCATAGTECHVSGWGITNHPRNPFPDLLQCLNLSIVSHATCHGVYPGRITSNMVCAGGVPGQDACQGDSGGPLVCGGVLQGLVSWGSVGPCGQDGIPGVYTYICNSTLVGLGTSWNFNSCQPF

SEQ ID NO: 55 - DNA, 1074 bp, Homo sapiens
  kallikrein 12 transcript variant 2
gcaggtaggtggacggagagatagcagcgacgaggacaggccaaacagtgacagccacgtagaggatctggcagacaaagagacaaggtgagaaggagactttggaagtgacccaccatggggctcagcatctttttgctcctgtgtgttcttgggctcagccaggcagccacaccgaagattttcaatggcactgagtgtgggcgtaactcacagccgtggcaggtggggctgtttgagggcaccagcctgcgctgcgggggtgtccttattgaccacaggtgggtcctcacagcggctcactgcagcggcagcaggtactgggtgcgcctgggggaacacagcctcagccagctcgactggaccgagcagatccggcacagcggcttctctgtgacccatcccggctacctgggagcctcgacgagccacgagcacgacctccggctgctgcggctgcgcctgcccgtccgcgtaaccagcagcgttcaacccctgcccctgcccaatgactgtgcaaccgctggcaccgagtgccacgtctcaggctggggcatcaccaaccacccacggaacccattcccggatctgctccagtgcctcaacctctccatcgtctcccatgccacctgccatggtgtgtatcccgggagaatcacgagcaacatggtgtgtgcaggcggcgtcccggggcaggatgcctgccagggtgattctgggggccccctggtgtgtgggggagtccttcaaggtctggtgtcctgggggtctgtggggccctgtggacaagatggcatccctggagtctacacctatatttgcaagtatgtggactggatccggatgatcatgaggaacaactgacctgtttcctccacctccacccccaccccttaacttgggtacccctctggccctcagagcaccaatatctcctccatcacttcccctagctccactcttgttggcctgggaacttcttggaactttaactcctgccagcccttctaagacccacgagcggggtgagagaagtgtgcaatagtctggaataaatataaatgaaggaggggc

SEQ ID NO: 56 - protein, 248 aa, Homo sapiens
  kallikrein 12 isoform 2
MGLSIFLLLCVLGLSQAATPKIFNGTECGRNSQPWQVGLFEGTSLRCGGVLIDHRWVLTAAHCSGSRYWVRLGEHSLSQLDWTEQIRHSGFSVTHPGYLGASTSHEHDLRLLRLRLPVRVTSSVQPLPLPNDCATAGTECHVSGWGITNHPRNPFPDLLQCLNLSIVSHATCHGVYPGRITSNMVCAGGVPGQDACQGDSGGPLVCGGVLQGLVSWGSVGPCGQDGIPGVYTYICKYVDWIRMIMRNN

SEQ ID NO: 57 - DNA, 814 bp, Homo sapiens
  kallikrein 12 transcript variant 3
gcaggtaggtggacggagagatagcagcgacgaggacaggccaaacagtgacagccacgtagaggatctggcagacaaagagacaaggtgagaaggagactttggaagtgacccaccatggggctcagcatctttttgctcctgtgtgttcttgggctcagccaggcagccacaccgaagattttcaatggcactgagtgtgggcgtaactcacagccgtggcaggtggggctgtttgagggcaccagcctgcgctgcgggggtgtccttattgaccacaggtgggtcctcacagcggctcactgcagcggcagacccattcccggatctgctccagtgcctcaacctctccatcgtctcccatgccacctgccatggtgtgtatcccgggagaatcacgagcaacatggtgtgtgcaggcggcgtcccggggcaggatgcctgccagggtgattctgggggccccctggtgtgtgggggagtccttcaaggtctggtgtcctgggggtctgtggggccctgtggacaagatggcatccctggagtctacacctatatttgcaagtatgtggactggatccggatgatcatgaggaacaactgacctgtttcctccacctccacccccaccccttaacttgggtacccctctggccctcagagcaccaatatctcctccatcacttcccctagctccactcttgttggcctgggaacttcttggaactttaactcctgccagcccttctaagacccacgagcggggtgagagaagtgtgcaatagtctggaataaatataaatgaaggaggggc

SEQ ID NO: 58 - protein, 111 aa, Homo sapiens
  kallikrein 12 isoform 3
MGLSIFLLLCVLGLSQAATPKIFNGTECGRNSQPWQVGLFEGTSLRCGGVLIDHRWVLTAAHCSGRPIPGSAPVPQPLHRLPCHLPWCVSRENHEQHGVCRRRPGAGCLPG

SEQ ID NO: 59 - DNA, 1471 bp, Homo sapiens
  DESC1 oritease
tgacttggatgtagacctcgaccttcacaggactcttcattgctggttggcaatgatgtatcggccagatgtggtgagggctaggaaaagagtttgttgggaaccctgggttatcggcctcgtcatcttcatatccctgattgtcctggcagtgtgcattggactcactgttcattatgtgagatataatcaaaagaagacctacaattactatagcacattgtcatttacaactgacaaactatatgctgagtttggcagagaggcttctaacaattttacagaaatgagccagagacttgaatcaatggtgaaaaatgcattttataaatctccattaagggaagaatttgtcaagtctcaggttatcaagttcagtcaacagaagcatggagtgttggctcatatgctgttgatttgtagatttcactctactgaggatcctgaaactgtagataaaattgttcaacttgttttacatgaaaagctgcaagatgctgtaggaccccctaaagtagatcctcactcagttaaaattaaaaaaatcaacaagacagaaacagacagctatctaaaccattgctgcggaacacgaagaagtaaaactctaggtcagagtctcaggatcgttggtgggacagaagtagaagagggtgaatggccctggcaggctagcctgcagtgggatgggagtcatcgctgtggagcaaccttaattaatgccacatggcttgtgagtgctgctcactgttttacaacatataagaaccctgccagatggactgcttcctttggagtaacaataaaaccttcgaaaatgaaacggggtctccggagaataattgtccatgaaaaatacaaacacccatcacatgactatgatatttctcttgcagagctttctagccctgttccctacacaaatgcagtacatagagtttgtctccctgatgcatcctatgagtttcaaccaggtgatgtgatgtttgtgacaggatttggagcactgaaaaatgatggttacagtcaaaatcatcttcgacaagcacaggtgactctcatagacgctacaacttgcaatgaacctcaagcttacaatgacgccataactcctagaatgttatgtgctggctccttagaaggaaaaacagatgcatgccagggtgactctggaggaccactggttagttcagatgctagagatatctggtaccttgctggaatagtgagctggggagatgaatgtgcgaaacccaacaagcctggtgtttatactagagttacggccttgcgggactggattacttcaaaaactggtatctaagagagaaaagcctcatggaacagataacatttttttttgttttttgggtgtggaggccatttttagagatacagaattggagaagacttgcaaaacagctagatttgactgatctcaataaactgtttgcttgatgcaaaaaaaaaa

SEQ ID NO: 60 - protein, 422 aa, Homo sapiens
  DESC1 oritease
MYRPDVVRARKRVCWEPWVIGLVIFISLIVLAVCIGLTVHYVRYNQKKTYNYYSTLSFTTDKLYAEFGREASNNFTEMSQRLESMVKNAFYKSPLREEFVKSQVIKFSQQKHGVLAHMLLICRFHSTEDPETVDKIVQLVLHEKLQDAVGPPKVDPHSVKIKKINKTETDSYLNHCCGTRRSKTLGQSLRIVGGTEVEEGEWPWQASLQWDGSHRCGATLINATWLVSAAHCFTTYKNPARWTASFGVTIKPSKMKRGLRRIIVHEKYKHPSHDYDISLAELSSPVPYTNAVHRVCLPDASYEFQPGDVMFVTGFGALKNDGYSQNHLRQAQVTLIDATTCNEPQAYNDAITPRMLCAGSLEGKTDACQGDSGGPLVSSDARDIWYLAGIVSWGDECAKPNKPGVYTRVTALRDWITSKTGI

SEQ ID NO: 61 - DNA, 1124 bp, Homo sapiens
  tryptase gamma 1
ccatggcccttggggcctgtggcctcctgctgctcctggctgtgcccggtgtgtccctcaggactttgcagccagggtgtggccggccgcaggtttcggatgcaggcggccggatcgtggggggtcacgctgccccggccggcgcatggccatggcaggccagcctccgcctgcggaggatgcacgtgtgcggcgggtcactgctcagcccccagtgggtgctcacagctgcccactgcttctccgggtccctgaactcatccgactaccaggtgcacctgggggaactggagatcactttgtctccccacttctccaccgtgaggcagatcatcctgcactccagcccctcaggacagccggggaccagcggggacatcgccctggtggagctcagtgtccccgtgaccctctccagccggatcctgcccgtctgcctcccggaggcctcagatgacttctgccctgggatccggtgctgggtgaccggctggggctatacgcgggagggagagcctctgccacccccgtacagcctgcgggaggtgaaagtctccgtggtggacacagagacctgccgccgggactatcccggccccgggggcagcatccttcagcccgacatgctgtgtgcccggggccccggggatgcctgccaggacgactccggggggcctctggtctgccaggtgaacggtgcctgggtgcaggctggcattgtgagctggggtgagggctgcggccgccccaacaggccgggagtctacactcgtgtccctgcctacgtgaactggatccgccgccacatcacagcatcagggggctcagagtctgggtaccccaggctccccctcctggctggcttcttcctccccggcctcttccttctgctagtctcctgtgtcctgctggccaagtgcctgctgcacccatctgcggatggtactcccttccccgcccctgactgatggcaggaatccaagtgcatttcttaaataagttactatttattccgctccgccccctccctctcccttgagaagctgagtcttctgcatcagattattgcaacatttaacctgaatttaaaagcacacgaaacaaaaaaaaaaaaaaaaaaaaaa

SEQ ID NO: 62 - protein, 321 aa, Homo sapiens
  tryptase gamma 1
MALGACGLLLLLAVPGVSLRTLQPGCGRPQVSDAGGRIVGGHAAPAGAWPWQASLRLRRMHVCGGSLLSPQWVLTAAHCFSGSLNSSDYQVHLGELEITLSPHFSTVRQIILHSSPSGQPGTSGDIALVELSVPVTLSSRILPVCLPEASDDFCPGIRCWVTGWGYTREGEPLPPPYSLREVKVSVVDTETCRRDYPGPGGSILQPDMLCARGPGDACQDDSGGPLVCQVNGAWVQAGIVSWGEGCGRPNRPGVYTRVPAYVNWIRRHITASGGSESGYPRLPLLAGFFLPGLFLLLVSCVLLAKCLLHPSADGTPFPAPD

SEQ ID NO: 63 - DNA, 1459 bp, Homo sapiens
  kallikrein hK14
gcacctagcagatcccaagctggggaatgccagttctggcaccaaccttcctgctccctgctggggcctctgctcccccatctctcaggagtcgaaagtgagaaagcaagacatcaaggagggacctgtgccctgctccacatcctcccacctgccgcccgcagagcctgcaggccccgcccccctcgtctctggtccctacctctctgctgtgtcttcatgtccctgagggtcttgggctctgggacctggccctcagcccctaaaatgttcctcctgctgacagcacttcaagtcctggctatagccatgacacagagccaagaggatgagaacaagataattggtggccatacgtgcacccggagctcccagccgtggcaggcggccctgctggcgggtcccaggcgccgcttcctctgcggaggcgccctgctttcaggccagtgggtcatcactgctgctcactgcggccgcccgatccttcaggttgccctgggcaagcacaacctgaggaggtgggaggccacccagcaggtgctgcgcgtggttcgtcaggtgacgcaccccaactacaactcccggacccacgacaacgacctcatgctgctgcagctacagcagcccgcacggatcgggagggcagtcaggcccattgaggtcacccaggcctgtgccagccccgggacctcctgccgagtgtcaggctggggaactatatccagccccatcgccaggtaccccgcctctctgcaatgcgtgaacatcaacatctccccggatgaggtgtgccagaaggcctatcctagaaccatcacgcctggcatggtctgtgcaggagttccccagggcgggaaggactcttgtcagggtgactctgggggacccctggtgtgcagaggacagctccagggcctcgtgtcttggggaatggagcgctgcgccctgcctggctaccccggtgtctacaccaacctgtgcaagtacagaagctggattgaggaaacgatgcgggacaaatgatggtcttcacggtgggatggacctcgtcagctgcccaggccctcctctctctactcaggacccaggagtccaggccccagcccctcctccctcagacccaggagtccaggcccccagcccctcctccctcagacccgggagtccaggcccccagcccctcctccctcagacccaggagccccagtccccagcatcctgatctttactccggctctgatctctcctttcccagagcagttgcttcaggcgttttctccccaccaagcccccacccttgctgtgtcaccatcactactcaagaccggaggcacagagggcaggagcacagaccccttaaaccggcattgtattccaaagacgacaatttttaacacgcttagtgtctctaaaaaccgaataaataatgacaataaaaatggaatcatcctaaattgta

SEQ ID NO: 64 - protein, 251 aa, Homo sapiens
  Kallikrein-14 precursor   S01.029
MFLLLTALQVLAIAMTQSQEDENKIIGGHTCTRSSQPWQAALLAGPRRRFLCGGALLSGQWVITAAHCGRPILQVALGKHNLRRWEATQQVLRVVRQVTHPNYNSRTHDNDLMLLQLQQPARIGRAVRPIEVTQACASPGTSCRVSGWGTISSPIARYPASLQCVNINISPDEVCQKAYPRTITPGMVCAGVPQGGKDSCQGDSGGPLVCRGQLQGLVSWGMERCALPGYPGVYTNLCKYRSWIEETMRDK

SEQ ID NO: 65 - DNA, 3008 bp, Homo sapiens
  hyaluronan-binding serine protease (HGF activator-like protein)
cctgaatccttggagactgacatttttcccccctaaaggcatagacaacaaaagaaattttattgagaggaaaacacaagtccttaaactgcaaagatgtttgccaggatgtctgatctccatgttctgctgttaatggctctggtgggaaagacagcctgtgggttctccctgatgtctttattggaaagcctggacccagactggacccctgaccagtatgattacagctacgaggattataatcaggaagagaacaccagtagcacacttacccacgctgagaatcctgactggtactacactgaggaccaagctgatccatgccagcccaacccctgtgaacacggtggggactgcctcgtccatgggagcaccttcacatgcagctgcctggctcctttctctgggaataagtgtcagaaagtgcaaaatacgtgcaaggacaacccatgtggccggggccaatgtctcattacccagagtcctccctactaccgctgtgtctgtaaacacccttacacaggtcccagctgctcccaagtggttcctgtatgcaggccaaacccctgccagaatggggctacctgctcccggcataagcggagatccaagttcacctgtgcctgtcccgaccagttcaaggggaaattctgtgaaataggttctgatgactgctatgttggcgatggctactcttaccgagggaaaatgaataggacagtcaaccagcatgcgtgcctttactggaactcccacctcctcttgcaggagaattacaacatgtttatggaggatgctgaaacccatgggattggggaacacaatttctgcagaaacccagatgcggacgaaaagccctggtgctttattaaagttaccaatgacaaggtgaaatgggaatactgtgatgtctcagcctgctcagcccaggacgttgcctacccagaggaaagccccactgagccatcaaccaagcttccggggtttgactcctgtggaaagactgagatagcagagaggaagatcaagagaatctatggaggctttaagagcacggcgggcaagcacccatggcaggcgtccctccagtcctcgctgcctctgaccatctccatgccccagggccacttctgtggtggggcgctgatccacccctgctgggtgctcactgctgcccactgcaccgacataaaaaccagacatctaaaggtggtgctaggggaccaggacctgaagaaagaagaatttcatgagcagagctttagggtggagaagatattcaagtacagccactacaatgaaagagatgagattccccacaatgatattgcattgctcaagttaaagccagtggatggtcactgtgctctagaatccaaatacgtgaagactgtgtgcttgcctgatgggtcctttccctctgggagtgagtgccacatctctggctggggtgttacagaaacaggaaaagggtcccgccagctcctggatgccaaagtcaagctgattgccaacactttgtgcaactcccgccaactctatgaccacatgattgatgacagtatgatctgtgcaggaaatcttcagaaacctgggcaagacacctgccagggtgactctggaggccccctgacctgtgagaaggacggcacctactacgtctatgggatagtgagctggggcctggagtgtgggaagaggccaggggtctacacccaagttaccaaattcctgaattggatcaaagccaccatcaaaagtgaaagtggcttctaaggtactgtcttctggacctcagagcccactctccttggcaccctgacaccgggaggcctcatggccaacaatggacacctccagagcctccaggggaccacacagtagactatccctactctaagcagagacaactgccacccagcctgggccttcccagaccagcatttgcacaatatcaccaggcttcttctgcctcccttggtaacccaaggaatgatggaatcaacacaacatagtatgtttgctttccttacccaattgtaccttctagaaaatcagtgttcacagagactgcctccaccacaggcatcctgcaaatgcagactccagaatccccagcatcagcgggaaccaccatcacatctttattcctcagcccagacactcgaggcactcaacagaatcagccatccacgtctaggtatcagagaggaccacaaatacaacattctccatctgctttcagagttattattttaataaaggaagatctgggatgggctggtgggccattccagcttgccgaaatcaaagccatctgaagcctgtctctggtgaacaaacttcctctctggcctctcaggaatcagggtggcatggctcacaacagcagggccttcttctttttgacgtgcagaatctcagtggcatctgggttcacctccccactctgatgatctccagcctccactgcttctgccccccgctgctgaaatcaaacataccccaagttaaaatgaagctcccccacccccactcccggccccggttcccacaggacacgctaagaagcacagggagcatttaacaggctcaccctccctttccttttcccctcttctaccctccccaagaaaaagggccttcaaggcaggaatgagaaagcaaagccaatctctcatttagacctggcttctttcttctgaacaaagtagggttcaaaatgcagactgtcatatccagcgagtccctgaccctttctgcgaatgtaacgagcaagcagtcagcacagcctgggctgccctggcccgggattgatgtagccccggtaggtttgcctctgcagaactaatggctgtgacttcagagaaagccctgcaggaagtttaacctgcgtgtcatctgcctggtcatctcagacccatgaaattaggcgccttgtttgagctgcgtttcacacttctttagagctagctgacctttggccaaaaataaactttgaaaag

SEQ ID NO: 66 - protein, 560 aa, Homo sapiens
  hyaluronan-binding serine protease (HGF activator-like protein)
MFARMSDLHVLLLMALVGKTACGFSLMSLLESLDPDWTPDQYDYSYEDYNQEENTSSTLTHAENPDWYYTEDQADPCQPNPCEHGGDCLVHGSTFTCSCLAPFSGNKCQKVQNTCKDNPCGRGQCLITQSPPYYRCVCKHPYTGPSCSQVVPVCRPNPCQNGATCSRHKRRSKFTCACPDQFKGKFCEIGSDDCYVGDGYSYRGKMNRTVNQHACLYWNSHLLLQENYNMFMEDAETHGIGEHNFCRNPDADEKPWCFIKVTNDKVKWEYCDVSACSAQDVAYPEESPTEPSTKLPGFDSCGKTEIAERKIKRIYGGFKSTAGKHPWQASLQSSLPLTISMPQGHFCGGALIHPCWVLTAAHCTDIKTRHLKVVLGDQDLKKEEFHEQSFRVEKIFKYSHYNERDEIPHNDIALLKLKPVDGHCALESKYVKTVCLPDGSFPSGSECHISGWGVTETGKGSRQLLDAKVKLIANTLCNSRQLYDHMIDDSMICAGNLQKPGQDTCQGDSGGPLTCEKDGTYYVYGIVSWGLECGKRPGVYTQVTKFLNWIKATIKSESGF

SEQ ID NO: 67 - DNA, 2124 bp, Homo sapiens
  transmembrane protease, serine 4 transcript variant 1
aatcaagctgcccaaagtcccccaatcactcctggaatacacagagagaggcagcagcttgctcagcggacaaggatgctgggcgtgagggaccaaggcctgccctgcactcgggcctcctccagccagtgctgaccagggacttctgacctgctggccagccaggacctgtgtggggaggccctcctgctgccttggggtgacaatctcagctccaggctacagggagaccgggaggatcacagagccagcatgttacaggatcctgacagtgatcaacctctgaacagcctcgatgtcaaacccctgcgcaaaccccgtatccccatggagaccttcagaaaggtggggatccccatcatcatagcactactgagcctggcgagtatcatcattgtggttgtcctcatcaaggtgattctggataaatactacttcctctgcgggcagcctctccacttcatcccgaggaagcagctgtgtgacggagagctggactgtcccttgggggaggacgaggagcactgtgtcaagagcttccccgaagggcctgcagtggcagtccgcctctccaaggaccgatccacactgcaggtgctggactcggccacagggaactggttctctgcctgtttcgacaacttcacagaagctctcgctgagacagcctgtaggcagatgggctacagcagcaaacccactttcagagctgtggagattggcccagaccaggatctggatgttgttgaaatcacagaaaacagccaggagcttcgcatgcggaactcaagtgggccctgtctctcaggctccctggtctccctgcactgtcttgcctgtgggaagagcctgaagaccccccgtgtggtgggtggggaggaggcctctgtggattcttggccttggcaggtcagcatccagtacgacaaacagcacgtctgtggagggagcatcctggacccccactgggtcctcacggcagcccactgcttcaggaaacataccgatgtgttcaactggaaggtgcgggcaggctcagacaaactgggcagcttcccatccctggctgtggccaagatcatcatcattgaattcaaccccatgtaccccaaagacaatgacatcgccctcatgaagctgcagttcccactcactttctcaggcacagtcaggcccatctgtctgcccttctttgatgaggagctcactccagccaccccactctggatcattggatggggctttacgaagcagaatggagggaagatgtctgacatactgctgcaggcgtcagtccaggtcattgacagcacacggtgcaatgcagacgatgcgtaccagggggaagtcaccgagaagatgatgtgtgcaggcatcccggaagggggtgtggacacctgccagggtgacagtggtgggcccctgatgtaccaatctgaccagtggcatgtggtgggcatcgttagctggggctatggctgcgggggcccgagcaccccaggagtatacaccaaggtctcagcctatctcaactggatctacaatgtctggaaggctgagctgtaatgctgctgcccctttgcagtgctgggagccgcttccttcctgccctgcccacctggggatcccccaaagtcagacacagagcaagagtccccttgggtacacccctctgcccacagcctcagcatttcttggagcagcaaagggcctcaattcctgtaagagaccctcgcagcccagaggcgcccagaggaagtcagcagccctagctcggccacacttggtgctcccagcatcccagggagagacacagcccactgaacaaggtctcaggggtattgctaagccaagaaggaactttcccacactactgaatggaagcaggctgtcttgtaaaagcccagatcactgtgggctggagaggagaaggaaagggtctgcgccagccctgtccgtcttcacccatccccaagcctactagagcaagaaaccagttgtaatataaaatgcactgccctactgttggtatgactaccgttacctactgttgtcattgttattacagctatggccactattattaaagagctgtgtaacatctctggaaaaaaaaaaaaaaaa

SEQ ID NO: 68 - protein, 437 aa, Homo sapiens
  transmembrane protease, serine 4 isoform 1
MLQDPDSDQPLNSLDVKPLRKPRIPMETFRKVGIPIIIALLSLASIIIVVVLIKVILDKYYFLCGQPLHFIPRKQLCDGELDCPLGEDEEHCVKSFPEGPAVAVRLSKDRSTLQVLDSATGNWFSACFDNFTEALAETACRQMGYSSKPTFRAVEIGPDQDLDVVEITENSQELRMRNSSGPCLSGSLVSLHCLACGKSLKTPRVVGGEEASVDSWPWQVSIQYDKQHVCGGSILDPHWVLTAAHCFRKHTDVFNWKVRAGSDKLGSFPSLAVAKIIIIEFNPMYPKDNDIALMKLQFPLTFSGTVRPICLPFFDEELTPATPLWIIGWGFTKQNGGKMSDILLQASVQVIDSTRCNADDAYQGEVTEKMMCAGIPEGGVDTCQGDSGGPLMYQSDQWHVVGIVSWGYGCGGPSTPGVYTKVSAYLNWIYNVWKAEL

SEQ ID NO: 69 - DNA, 1983 bp, Homo sapiens
  transmembrane protease, serine 4 transcript variant 2
aatcaagctgcccaaagtcccccaatcactcctggaatacacagagagaggcagcagcttgctcagcggacaaggatgctgggcgtgagggaccaaggcctgccctgcactcgggcctcctccagccagtgctgaccagggacttctgacctgctggccagccaggacctgtgtggggaggccctcctgctgccttggggtgacaatctcagctccaggctacagggagaccgggaggatcacagagccagcatggatcctgacagtgatcaacctctgaacagcctcgatgtcaaacccctgcgcaaaccccgtatccccatggagaccttcagaaaggtggggatccccatcatcatagcactactgagcctggcgagtatcatcattgtggttgtcctcatcaaggtgattctggataaatactacttcctctgcgggcagcctctccacttcatcccgaggaagcagctgtgtgacggagagctggactgtcccttgggggaggacgaggagcactgtgtcaagagcttccccgaagggcctgcagtggcagtccgcctctccaaggaccgatccacactgcaggtgctggactcggccacagggaactggttctctgcctgtttcgacaacttcacagaagctctcgctgagacagcctgtaggcagatgggctacagcagcaaacccactttcagagctgtggagattggcccagaccaggatctggatgttgttgaaatcacagaaaacagccaggagcttcgcatgcggaactcaagtgggccctgtctctcaggctccctggtctccctgcactgtcttgcctgtgggaagagcctgaagaccccccgtgtggtgggtggggaggaggcctctgtggattcttggccttggcaggtcagcatccagtacgacaaacagcacgtctgtggagggagcatcctggacccccactgggtcctcacggcagcccactgcttcaggaaacataccgatgtgttcaactggaaggtgcgggcaggctcagacaaactgggcagcttcccatccctggctgtggccaagatcatcatcattgaattcaaccccatgtaccccaaagacaatgacatcgccctcatgaagctgcagttcccactcactttctcaggcacagtcaggcccatctgtctgcccttctttgatgaggagctcactccagccaccccactctggatcattggatggggctttacgaagcagaatggagggtgacagtggtgggcccctgatgtaccaatctgaccagtggcatgtggtgggcatcgttagctggggctatggctgcgggggcccgagcaccccaggagtatacaccaaggtctcagcctatctcaactggatctacaatgtctggaaggctgagctgtaatgctgctgcccctttgcagtgctgggagccgcttccttcctgccctgcccacctggggatcccccaaagtcagacacagagcaagagtccccttgggtacacccctctgcccacagcctcagcatttcttggagcagcaaagggcctcaattcctgtaagagaccctcgcagcccagaggcgcccagaggaagtcagcagccctagctcggccacacttggtgctcccagcatcccagggagagacacagcccactgaacaaggtctcaggggtattgctaagccaagaaggaactttcccacactactgaatggaagcaggctgtcttgtaaaagcccagatcactgtgggctggagaggagaaggaaagggtctgcgccagccctgtccgtcttcacccatccccaagcctactagagcaagaaaccagttgtaatataaaatgcactgccctactgttggtatgactaccgttacctactgttgtcattgttattacagctatggccactattattaaagagctgtgtaacatctctggaaaaaaaaaaaaaaaaaaaaaaaa

SEQ ID NO: 70 - protein, 335 aa, Homo sapiens
  transmembrane protease, serine 4 isoform 2
MDPDSDQPLNSLDVKPLRKPRIPMETFRKVGIPIIIALLSLASIIIVVVLIKVILDKYYFLCGQPLHFIPRKQLCDGELDCPLGEDEEHCVKSFPEGPAVAVRLSKDRSTLQVLDSATGNWFSACFDNFTEALAETACRQMGYSSKPTFRAVEIGPDQDLDVVEITENSQELRMRNSSGPCLSGSLVSLHCLACGKSLKTPRVVGGEEASVDSWPWQVSIQYDKQHVCGGSILDPHWVLTAAHCFRKHTDVFNWKVRAGSDKLGSFPSLAVAKIIIIEFNPMYPKDNDIALMKLQFPLTFSGTVRPICLPFFDEELTPATPLWIIGWGFTKQNGG

SEQ ID NO: 71 - DNA, 855 bp, Homo sapiens
  tryptase delta 1
aggcccacgatgctcctccttgctccccagatgctgagcctgctgctgctggcgctgcccgtcctggcgagcccggcctacgtggcccctgccccaggccaggccctgcagcaaacgggcattgttggggggcaggaggcccccaggagcaagtggccctggcaggtgagcctgagagtccgcggcccatactggatgcacttctgcgggggctccctcatccacccccagtgggtgctaaccgcggcgcactgcgtggaaccggacatcaaggatctggccgccctcagggtgcaactgcgggagcagcacctctactaccaggaccagctgctgccggtcagcaggatcatcgtgcacccacagttctacatcatccagaccggggcggacatcgccctgctggagctggaggagcccgtgaacatctccagccacatccacacggtcacgctgccccctgcctcggagaccttccccccggggatgccgtgctgggtcactggctggggcgacgtggacaataatgtgcacctgccgccgccatacccgctgaaggaggtggaagtccccgtagtggaaaaccacctttgcaacgcggaatatcacaccggcctccatacgggccacagctttcaaatcgtccgcgatgacatgctgtgtgcggggagcgaaaatcacgactcctgccagggtgactctggagggcccctggtctgcaaggtgaatggcacctaactgcaggcgggcgtggtcagctgggaggagagctgtgcccagcccaaccggcctggcatctacacccgtgtcacctactacttggactggatccaccactatgtccccaagaagccc

SEQ ID NO: 72 - protein, 242 aa, Homo sapiens
  tryptase delta 1
MLLLAPQMLSLLLLALPVLASPAYVAPAPGQALQQTGIVGGQEAPRSKWPWQVSLRVRGPYWMHFCGGSLIHPQWVLTAAHCVEPDIKDLAALRVQLREQHLYYQDQLLPVSRIIVHPQFYIIQTGADIALLELEEPVNISSHIHTVTLPPASETFPPGMPCWVTGWGDVDNNVHLPPPYPLKEVEVPVVENHLCNAEYHTGLHTGHSFQIVRDDMLCAGSENHDSCQGDSGGPLVCKVNGT

SEQ ID NO: 73 - DNA, 1462 bp, Homo sapiens
  Marapsin
ctgtctcaaaaaattaaaaaaaataataataataataatgaatgaagctggacggacttcgcgtgcaccgcggtcagctcggggtctgctggggggtctgggtcagctcagggtccaggaaccgaggccaacggcaccccgtgctgcgctggggtgaggggtctgccctggggtctcggggttcagggctaggtcacggaggagtcggctctgggcgcttccttcctgaggagaggagctgggcaggccgggccgacgggttgggccgcatagccgggcctgtgctcatctccagcataaaactccacttcatggagcctgcacctcgctcgtgctccaacgcttctgccaccgccgaccacggccctgcgccccagccaggcctgaggacatgaggcggccggcggcggtgccgctcctgctgctgctgtgttttgggtctcagagggccaaggcagcaacagcctgtggtcgccccaggatgctgaaccgaatggtgggcgggcaggacacgcaggagggcgagtggccctggcaagtcagcatccagcgcaacggaagccacttctgcgggggcagcctcatcgcggagcagtgggtcctgacggctgcgcactgcttccgcaacacctctgagacgtccctgtaccaggtcctgctgggggcaaggcagctagtgcagccgggaccacacgctatgtatgcccgggtgaggcaggtggagagcaaccccctgtaccagggcacggcctccagcgctgacgtggccctggtggagctggaggcaccagtgcccttcaccaattacatcctccccgtgtgcctgcctgacccctcggtgatctttgagacgggcatgaactgctgggtcactggctggggcagccccagtgaggaagacctcctgcccgaaccgcggatcctgcagaaactcgctgtgcccatcatcgacacacccaagtgcaacctgctctacagcaaagacaccgagtttggctaccaacccaaaaccatcaagaatgacatgctgtgcgccggcttcgaggagggcaagaaggatgcctgcaagggcgactcgggcggccccctggtgtgcctcgtgggtcagtcgtggctgcaggcgggggtgatcagctggggtgagggctgtgcccgccagaaccgcccaggtgtctacatccgtgtcaccgcccaccacaactggatccatcggatcatccccaaactgcagttccagccagcgaggttgggcggccagaagtgagacccccggggccaggagccccttgagcagagctctgcacccagcctgcccgcccacaccatcctgctggtcctcccagcgctgctgttgcacctgtgagccccaccagactcatttgtaaatagcgctccttcctcccctctcaaatacccttattttatttatgtttctcccaataaaaacccagcctgtgtgcca

SEQ ID NO: 74 - protein, 290 aa, Homo sapiens
  Marapsin
MRRPAAVPLLLLLCFGSQRAKAATACGRPRMLNRMVGGQDTQEGEWPWQVSIQRNGSHFCGGSLIAEQWVLTAAHCFRNTSETSLYQVLLGARQLVQPGPHAMYARVRQVESNPLYQGTASSADVALVELEAPVPFTNYILPVCLPDPSVIFETGMNCWVTGWGSPSEEDLLPEPRILQKLAVPIIDTPKCNLLYSKDTEFGYQPKTIKNDMLCAGFEEGKKDACKGDSGGPLVCLVGQSWLQAGVISWGEGCARQNRPGVYIRVTAHHNWIHRIIPKLQFQPARLGGQK

SEQ ID NO: 75 - DNA, 1755 bp, Homo sapiens
  Tryptase homologue 2
ccaggacttccgtctgagatgggatttctggacagaacaatggagcgcagaagctccagcaacgtgtgctctgcagggagcccagaccagagtccaagccctaggcagtgccacccttacccagcccagccttgaagacagaatgagaggggtttcctgtctccaggtcctgctccttctggtgctgggagctgctgggactcagggaaggaagtctgcagcctgcgggcagccccgcatgtccagtcggatcgttgggggccgggatggccgggacggagagtggccgtggcaggcgagcatccagcatcgtggggcacacgtgtgcggggggtcgctcatcgccccccagtgggtgctgacagcggcgcactgcttccccaggagggcactgccagctgagtaccgcgtgcgcctgggggcgctgcgtctgggctccacctcgccccgcacgctctcggtgcccgtgcgacgggtgctgctgcccccggactactccgaggacggggcccgcggcgacctggcactgctgcagctgcgtcgcccggtgcccctgagcgctcgcgtccaacccgtctgcctgcccgtgcccggcgcccgcccgccgcccggcacaccatgccgggtcaccggctggggcagcctccgcccaggagtgcccctcccagagtggcgaccgctacaaggagtaagggtgccgctgctggactcgcgcacctgcgacggcctctaccacgtgggcgcggacgtgccccaggctgagcgcattgtgctgcctgggagtctgtgtgccggctacccccagggccacaaggacgcctgccagggtgattctgggggacctctgacctgcctgcagtctgggagctgggtcctggtgggcgtggtgagctggggcaagggttgtgccctgcccaaccgtccaggggtctacaccagtgtggccacatatagcccctggattcaggctcgcgtcagcttctaatgctagccggtgaggctgacctggagccagctgctggggtccctcagcctcctggttcatccaggcacctgcctataccccacatcccttctgcctcgaggccaagatgcctaaaaaagctaaaggccaccccaccccccacccaccacctcctgcctcctctcctctttggggatcaccagctctgactccaccaaccctcatccaggaatctgccatgagtcccagggagtcacactccccactcccttcctggcttgtatttacttttcttggccctggccagggctgggcgcaaggcacgcagtgatgggcaaaccaattgctgcccatctggcctgtgtgcccatctttttctggagaaagtcagattcacagcatgacagagatttgacaccagggagatcctccatagctggctttgaggacacggggaccacagccatgagcggcctctaagagctgagagacagccggcagggaatcggaaccctcagacccacagccgcaaggcactggattctggcagcaccctgaaggagctgggaagtaagttcttccccagcctccagataagagccccgccggccaatcccttcatttcaacctaaagagaccctaagcagagaacctagctgagccactcctgacctacaaagttgtgacttaataaatgtgtgctttgaacccaaaaaaaaaaaaaaaaaaaaaaaaaaaaaaaaaaaaaaaaaaaaaaaaaaaaaaaaaaaaaaaaaaaaaaaaaaaaaaaa

SEQ ID NO: 76 - protein, 284 aa, Homo sapiens
  Tryptase homologue 2
MRGVSCLQVLLLLVLGAAGTQGRKSAACGQPRMSSRIVGGRDGRDGEWPWQASIQHPGAHVCGGSLIAPQWVLTAAHCFPRRALPAEYRVRLGALRLGSTSPRTLSVPVRRVLLPPDYSEDGARGDLALLQLRRPVPLSARVQPVCLPVPGARPPPGTPCRVTGWGSLRPGVPLPEWRPLQGVRVPLLDSRTCDGLYHVGADVPQAERIVLPGSLCAGYPQGHKDACQGDSGGPLTCLQSGSWVLVGVVSWGKGCALPNRPGVYTSVATYSPWIQARVTSNASR

SEQ ID NO: 77 - DNA, 321 bp, Homo sapiens
  Tryptase homologue 3
gcgctggtggcgggcggagtggagtccgcgcgcgggcgctggccatggcaggccagcctgcgcctgaggagacgccaccgatgtggagggagcctgctcagccgccgctgggtgctctcggctgcgcactgcttcgctccccagggtgactcaggtggacccttggtctgtgacaaggatggactgtggtatcaggttggaatcgtgagctggggaatggactgcggtcaacccaatcggcctggtgtctacaccaacatcagtgtgtacttccactggatccggagggtgatgtcccacagtacacccaggccaaacccc

SEQ ID NO: 78 - protein, 107 aa, Homo sapiens
  Tryptase homologue 3
ALVAGGVESARGRWPWQASLRLRRRHRCGGSLLSRRWVLSAAHCFAPQGDSGGPLVCDKDGLWYQVGIVSWGMDCGQPNRPGVYTNISVYFHWIRRVMSHSTPRPNP

SEQ ID NO: 79 - DNA, 2468 bp, Homo sapiens
  transmembrane protease, serine 3 transcript variant A
accgggcaccggacggctcgggtactttcgttcttaattaggtcatgcccgtgtgagccaggaaagggctgtgtttatgggaagccagtaacactgtggcctactatctcttccgtggtgccatctacatttttgggactcgggaattatgaggtagaggtggaggcggagccggatgtcagaggtcctgaaatagtcaccatgggggaaaatgatccgcctgctgttgaagcccccttctcattccgatcgctttttggccttgatgatttgaaaataagtcctgttgcaccagatgcagatgctgttgctgcacagatcctgtcactgctgccattgaagttttttccaatcatcgtcattgggatcattgcattgatattagcactggccattggtctgggcatccacttcgactgctcagggaagtacagatgtcgctcatcctttaagtgtatcgagctgatagctcgatgtgacggagtctcggattgcaaagacggggaggacgagtaccgctgtgtccgggtgggtggtcagaatgccgtgctccaggtgttcacagctgcttcgtggaagaccatgtgctccgatgactggaagggtcactacgcaaatgttgcctgtgcccaactgggtttcccaagctatgtgagttcagataacctcagagtgagctcgctggaggggcagttccgggaggagtttgtgtccatcgatcacctcttgccagatgacaaggtgactgcattacaccactcagtatatgtgagggagggatgtgcctctggccacgtggttaccttgcagtgcacagcctgtggtcatagaaggggctacagctcacgcatcgtgggtggaaacatgtccttgctctcgcagtggccctggcaggccagccttcagttccagggctaccacctgtgcgggggctctgtcatcacgcccctgtggatcatcactgctgcacactgtgtttatgacttgtacctccccaagtcatggaccatccaggtgggtctagtttccctgttggacaatccagccccatcccacttggtggagaagattgtctaccacagcaagtacaagccaaagaggctgggcaatgacatcgcccttatgaagctggccgggccactcacgttcaatgaaatgatccagcctgtgtgcctgcccaactctgaagagaacttccccgatggaaaagtgtgctggacgtcaggatggggggccacagaggatggagcaggtgacgcctcccctgtcctgaaccacgcggccgtccctttgatttccaacaagatctgcaaccacagggacgtgtacggtggcatcatctccccctccatgctctgcgcgggctacctgacgggtggcgtggacagctgccagggggacagcggggggcccctggtgtgtcaagagaggaggctgtggaagttagtgggagcgaccagctttggcatcggctgcgcagaggtgaacaagcctggggtgtacacccgtgtcacctccttcctggactggatccacgagcagatggagagagacctaaaaacctgaagaggaaggggacaagtagccacctgagttcctgaggtgatgaagacagcccgatcctcccctggactcccgtgtaggaacctgcacacgagcagacacccttggagctctgagttccggcaccagtagcaggcccgaaagaggcacccttccatctgattccagcacaaccttcaagctgctttttgttttttgtttttttgaggtggagtctcgctctgttgcccaggctggagtgcagtggcgaaatccctgctcactgcagcctccgcttccctggttcaagcgattctcttgcctcagcttccccagtagctgggaccacaggtgcccgccaccacacccaactaatttttgtatttttagtagagacagggtttcaccatgttggccaggctgctctcaaacccctgacctcaaatgatgtgcctgcttcagcctcccacagtgctgggattacaggcatgggccaccacgcctagcctcacgctcctttctgatcttcactaagaacaaaagaagcagcaacttgcaagggcggcctttcccactggtccatctggttttctctccaggggtcttgcaaaattcctgacgagataagcagttatgtgacctcacgtgcaaagccaccaacagccactcagaaaagacgcaccagcccagaagtgcagaactgcagtcactgcacgttttcatctctagggaccagaaccaaacccaccctttctacttccaagacttattttcacatgtggggaggttaatctaggaatgactcgtttaaggcctattttcatgatttctttgtagcatttggtgcttgacgtattattgtcctttgattccaaataatatgtttccttccctcaaaaaaaaaaaaaaaaaaaaaaaaaaaaaaa

SEQ ID NO: 80 - protein, 454 aa, Homo sapiens
  transmembrane protease, serine 3 isoform 1
MGENDPPAVEAPFSFRSLFGLDDLKISPVAPDADAVAAQILSLLPLKFFPIIVIGIIALILALAIGLGIHFDCSGKYRCRSSFKCIELIARCDGVSDCKDGEDEYRCVRVGGQNAVLQVFTAASWKTMCSDDWKGHYANVACAQLGFPSYVSSDNLRVSSLEGQFREEFVSIDHLLPDDKVTALHHSVYVREGCASGHVVTLQCTACGHRRGYSSRIVGGNMSLLSQWPWQASLQFQGYHLCGGSVITPLWIITAAHCVYDLYLPKSWTIQVGLVSLLDNPAPSHLVEKIVYHSKYKPKRLGNDIALMKLAGPLTFNEMIQPVCLPNSEENFPDGKVCWTSGWGATEDGAGDASPVLNHAAVPLISNKICNHRDVYGGIISPSMLCAGYLTGGVDSCQGDSGGPLVCQERRLWKLVGATSFGIGCAEVNKPGVYTRVTSFLDWIHEQMERDLKT

SEQ ID NO: 81 - DNA, 2554 bp, Homo sapiens
  transmembrane protease, serine 3 transcript variant B
gccacgttggattagggcccaccctaatgactcattttaactagatgactctgtaaagactctccaggccatctccaaataagatgccattctgaggtactaagagttaagacctcaacgtgtctttctgggggatactattcaacccatagcacatcccctcatcccccatggaataaccgggtcagaggtggagcaggtaggactgaactagagaatgtgccccttggtgggtggccctttccctaattaaggcacctttctttgggctgagacttctctgcaaagaggggagggggaaaggatagttaaatttgtaagtttcatggcactccaagtcaggttctggggctttctgctcttcctttttctggttatcagatgcagatgctgttgctgcacagatcctgtcactgctgccattgaagttttttccaatcatcgtcattgggatcattgcattgatattagcactggccattggtctgggcatccacttcgactgctcagggaagtacagatgtcgctcatcctttaagtgtatcgagctgatagctcgatgtgacggagtctcggattgcaaagacggggaggacgagtaccgctgtgtccgggtgggtggtcagaatgccgtgctccaggtgttcacagctgcttcgtggaagaccatgtgctccgatgactggaagggtcactacgcaaatgttgcctgtgcccaactgggtttcccaagctatgtgagttcagataacctcagagtgagctcgctggaggggcagttccgggaggagtttgtgtccatcgatcacctcttgccagatgacaaggtgactgcattacaccactcagtatatgtgagggagggatgtgcctctggccacgtggttaccttgcagtgcacagcctgtggtcatagaaggggctacagctcacgcatcgtgggtggaaacatgtccttgctctcgcagtggccctggcaggccagccttcagttccagggctaccacctgtgcgggggctctgtcatcacgcccctgtggatcatcactgctgcacactgtgtttatgacttgtacctccccaagtcatggaccatccaggtgggtctagtttccctgttggacaatccagccccatcccacttggtggagaagattgtctaccacagcaagtacaagccaaagaggctgggcaatgacatcgcccttatgaagctggccgggccactcacgttcaatgaaatgatccagcctgtgtgcctgcccaactctgaagagaacttccccgatggaaaagtgtgctggacgtcaggatggggggccacagaggatggagcaggtgacgcctcccctgtcctgaaccacgcggccgtccctttgatttccaacaagatctgcaaccacagggacgtgtacggtggcatcatctccccctccatgctctgcgcgggctacctgacgggtggcgtggacagctgccagggggacagcggggggcccctggtgtgtcaagagaggaggctgtggaagttagtgggagcgaccagctttggcatcggctgcgcagaggtgaacaagcctggggtgtacacccgtgtcacctccttcctggactggatccacgagcagatggagagagacctaaaaacctgaagaggaaggggacaagtagccacctgagttcctgaggtgatgaagacagcccgatcctcccctggactcccgtgtaggaacctgcacacgagcagacacccttggagctctgagttccggcaccagtagcaggcccgaaagaggcacccttccatctgattccagcacaaccttcaagctgctttttgttttttgtttttttgaggtggagtctcgctctgttgcccaggctggagtgcagtggcgaaatccctgctcactgcagcctccgcttccctggttcaagcgattctcttgcctcagcttccccagtagctgggaccacaggtgcccgccaccacacccaactaatttttgtatttttagtagagacagggtttcaccatgttggccaggctgctctcaaacccctgacctcaaatgatgtgcctgcttcagcctcccacagtgctgggattacaggcatgggccaccacgcctagcctcacgctcctttctgatcttcactaagaacaaaagaagcagcaacttgcaagggcggcctttcccactggtccatctggttttctctccaggggtcttgcaaaattcctgacgagataagcagttatgtgacctcacgtgcaaagccaccaacagccactcagaaaagacgcaccagcccagaagtgcagaactgcagtcactgcacgttttcatctctagggaccagaaccaaacccaccctttctacttccaagacttattttcacatgtggggaggttaatctaggaatgactcgtttaaggcctattttcatgatttctttgtagcatttggtgcttgacgtattattgtcctttgattccaaataatatgtttccttccctcaaaaaaaaaaaaaaaaaaaaaaaaaaaaaaa

SEQ ID NO: 82 - protein, 327 aa, Homo sapiens
  transmembrane protease, serine 3 isoform 2
MCSDDWKGHYANVACAQLGFPSYVSSDNLRVSSLEGQFREEFVSIDHLLPDDKVTALHHSVYVREGCASGHVVTLQCTACGHRRGYSSRIVGGNMSLLSQWPWQASLQFQGYHLCGGSVITPLWIITAAHCVYDLYLPKSWTIQVGLVSLLDNPAPSHLVEKIVYHSKYKPKRLGNDIALMKLAGPLTFNEMIQPVCLPNSEENFPDGKVCWTSGWGATEDGAGDASPVLNHAAVPLISNKICNHRDVYGGIISPSMLCAGYLTGGVDSCQGDSGGPLVCQERRLWKLVGATSFGIGCAEVNKPGVYTRVTSFLDWIHEQMERDLKT

SEQ ID NO: 83 - DNA, 2135 bp, Homo sapiens
  transmembrane protease, serine 3 transcript variant  C
gcagggggacagttgttagtgttgcactctgaaagagctgttggttaattcctgccttcctcccttttcccagtccacttcgactgctcagggaagtacagatgtcgctcatcctttaagtgtatcgagctgatagctcgatgtgacggagtctcggattgcaaagacggggaggacgagtaccgctgtgtccgggtgggtggtcagaatgccgtgctccaggtgttcacagctgcttcgtggaagaccatgtgctccgatgactggaagggtcactacgcaaatgttgcctgtgcccaactgggtttcccaagctatgtgagttcagataacctcagagtgagctcgctggaggggcagttccgggaggagtttgtgtccatcgatcacctcttgccagatgacaaggtgactgcattacaccactcagtatatgtgagggagggatgtgcctctggccacgtggttaccttgcagtgcacagcctgtggtcatagaaggggctacagctcacgcatcgtgggtggaaacatgtccttgctctcgcagtggccctggcaggccagccttcagttccagggctaccacctgtgcgggggctctgtcatcacgcccctgtggatcatcactgctgcacactgtgtttatgacttgtacctccccaagtcatggaccatccaggtgggtctagtttccctgttggacaatccagccccatcccacttggtggagaagattgtctaccacagcaagtacaagccaaagaggctgggcaatgacatcgcccttatgaagctggccgggccactcacgttcaatgaaatgatccagcctgtgtgcctgcccaactctgaagagaacttccccgatggaaaagtgtgctggacgtcaggatggggggccacagaggatggagcaggtgacgcctcccctgtcctgaaccacgcggccgtccctttgatttccaacaagatctgcaaccacagggacgtgtacggtggcatcatctccccctccatgctctgcgcgggctacctgacgggtggcgtggacagctgccagggggacagcggggggcccctggtgtgtcaagagaggaggctgtggaagttagtgggagcgaccagctttggcatcggctgcgcagaggtgaacaagcctggggtgtacacccgtgtcacctccttcctggactggatccacgagcagatggagagagacctaaaaacctgaagaggaaggggacaagtagccacctgagttcctgaggtgatgaagacagcccgatcctcccctggactcccgtgtaggaacctgcacacgagcagacacccttggagctctgagttccggcaccagtagcaggcccgaaagaggcacccttccatctgattccagcacaaccttcaagctgctttttgttttttgtttttttgaggtggagtctcgctctgttgcccaggctggagtgcagtggcgaaatccctgctcactgcagcctccgcttccctggttcaagcgattctcttgcctcagcttccccagtagctgggaccacaggtgcccgccaccacacccaactaatttttgtatttttagtagagacagggtttcaccatgttggccaggctgctctcaaacccctgacctcaaatgatgtgcctgcttcagcctcccacagtgctgggattacaggcatgggccaccacgcctagcctcacgctcctttctgatcttcactaagaacaaaagaagcagcaacttgcaagggcggcctttcccactggtccatctggttttctctccaggggtcttgcaaaattcctgacgagataagcagttatgtgacctcacgtgcaaagccaccaacagccactcagaaaagacgcaccagcccagaagtgcagaactgcagtcactgcacgttttcatctctagggaccagaaccaaacccaccctttctacttccaagacttattttcacatgtggggaggttaatctaggaatgactcgtttaaggcctattttcatgatttctttgtagcatttggtgcttgacgtattattgtcctttgattccaaataatatgtttccttccctcaaaaaaaaaaaaaaaaaaaaaaaaaaaaaaa

SEQ ID NO: 84 - protein, 327 aa, Homo sapiens; identical to SEQ ID NO: 82
  transmembrane protease, serine 3 isoform 2

SEQ ID NO: 85 - DNA, 1359 bp, Homo sapiens
  transmembrane protease, serine 3 transcript variant  D
accgggcaccggacggctcgggtactttcgttcttaattaggtcatgcccgtgtgagccaggaaagggctgtgtttatgggaagccagtaacactgtggcctactatctcttccgtggtgccatctacatttttgggactcgggaattatgaggtagaggtggaggcggagccggatgtcagaggtcctgaaatagtcaccatgggggaaaatgatccgcctgctgttgaagcccccttctcattccgatcgctttttggccttgatgatttgaaaataagtcctgttgcaccagatgcagatgctgttgctgcacagatcctgtcactgctgccattgaagttttttccaatcatcgtcattgggatcattgcattgatattagcactggccattggtctgggcatccacttcgactgctcagggaagtacagatgtcgctcatcctttaagtgtatcgagctgatagctcgatgtgacggagtctcggattgcaaagacggggaggacgagtaccgctgtgtccgggtgggtggtcagaatgccgtgctccaggtgttcacagctgcttcgtggaagaccatgtgctccgatgactggaagggtcactacgcaaatgttgcctgtgcccaactgggtttcccaagctatgtgagttcagataacctcagagtgagctcgctggaggggcagttccgggaggagtttgtgtccatcgatcacctcttgccagatgacaaggtgactgcattacaccactcagtatatgtgagggagggatgtgcctctggccacgtggttaccttgcagtgcacagcctgtggtcatagaaggggctacagctcacgcatcgtgggtggaaacatgtccttgctctcgcagtggccctggcaggccagccttcagttccagggctaccacctgtgcgggggctctgtcatcacgcccctgtggatcatcactgctgcacactgtgtttatgacttgtacctccccaagtcatggaccatccaggtgggtctagtttccctgttggacaatccagccccatcccacttggtggagaagattgtctaccacagcaagtacaagccaaagaggctgggcaatgacatcgcccttatgaagctggccgggccactcacgttcaatggtacatctgggtctctatgtggttctgcagctcttcctttgtttcaagaggatttgcaattgctcattgaagcattcttatgatggctgctttataatccttgtcagatattaataattccaactcctgattcatgttggtgttggcatcagttgattatcttttctcattaaaattgtgatgctcctaaaaaaaaaaaaaaaaaa

SEQ ID NO: 86 - protein, 344 aa, Homo sapiens
  transmembrane protease, serine 3 isoform 3
MGENDPPAVEAPFSFRSLFGLDDLKISPVAPDADAVAAQILSLLPLKFFPIIVIGIIALILALAIGLGIHFDCSGKYRCRSSFKCIELIARCDGVSDCKDGEDEYRCVRVGGQNAVLQVFTAASWKTMCSDDWKGHYANVACAQLGFPSYVSSDNLRVSSLEGQFREEFVSIDHLLPDDKVTALHHSVYVREGCASGHVVTLQCTACGHRRGYSSRIVGGNMSLLSQWPWQASLQFQGYHLCGGSVITPLWIITAAHCVYDLYLPKSWTIQVGLVSLLDNPAPSHLVEKIVYHSKYKPKRLGNDIALMKLAGPLTFNGTSGSLCGSAALPLFQEDLQLLIEAFL

SEQ ID NO: 87 - DNA, 1191 bp, Homo sapiens
  kallikrein hK15 transcript variant 1
actgcagccgaaccctggtccctcctccacaatgtggcttctcctcactctctccttcctgctggcatccacagcagcccaggatggtgacaagttgctggaaggtgacgagtgtgcaccccactcccagccatggcaagtggctctctacgagcgtggacgctttaactgtggcgcttccctcatctccccacactgggtgctgtctgcggcccactgccaaagccgcttcatgagagtgcgcctgggagagcacaacctgcgcaagcgcgatggcccagagcaactacggaccacgtctcgggtcattccacacccgcgctacgaagcgcgcagccaccgcaacgacatcatgttgctgcgcctagtccagcccgcacgcctgaacccccagtgagtctcccagatacgttgcattgtgccaacatcagcattatctcggacacatcttgtgacaagagctacccagggcgcctgacaaacaccatggtgtgtgcaggcgcggagggcagaggcgcagaatcctgtgagggtgactctgggggacccctggtctgtgggggcatcctgcagggcattgtgtcctggggtgacgtcccttgtgacaacaccaccaagcctggtgtctataccaaagtctgccactacttggagtggatcagggaaaccatgaagaggaactgactattctagcctatctcctgtgcccctgactgagcagaagcccccacagctggccagcagccccgcctgacatggaacagaacggagccatcccccaagaccctgtccaaggcccagatgttagccaaggacttgtcccacctgaggacaaagctggcgctcaaggtcacctgtttaatgccaagataacaaagcgctgatccaagttgctctgtaggaatttctgtgacttttttctggggtcaaagagaaaccccgagacactgtacactgttccttttcacccaccaccccgatccctaggtgaggagaagcggcttgaagcagggctccattcattcaacacacatgaccacccgtgtgatcttgaacaagaggcccaatctcacttcgccttggtttccttatctgtaaaatgagaccatcttattgctgacttcaaagggctgttgtgaggattaaatgagatgattcgtctgaactgattaaaatcgtgtctggcactga

SEQ ID NO: 88 - protein, 121 aa, Homo sapiens
  kallikrein hK15 isoform 1
MWLLLTLSFLLASTAAQDGDKLLEGDECAPHSQPWQVALYERGRFNCGASLISPHWVLSAAHCQSRFMRVRLGEHNLRKRDGPEQLRTTSRVIPHPRYEARSHRNDIMLLRLVQPARLNPQ

SEQ ID NO: 89 - DNA, 1172 bp, Homo sapiens
  kallikrein hK15 transcript variant 2
actgcagccgaaccctggtccctcctccacaatgtggcttctcctcactctctccttcctgctggcatccacagcagcccaggatggtgacaagttgctggaaggtgacgagtgtgcaccccactcccagccatggcaagtggctctctacgagcgtggacgctttaactgtggcgcttccctcatctccccacactgggtgctgtctgcggcccactgccaaagccgcttcatgagagtgcgcctgggagagcacaacctgcgcaagcgcgatggcccagagcaactacggaccacgtctcgggtcattccacacccgcgctacgaagcgcgcagccaccgcaacgacatcatgttgctgcgcctagtccagcccgcacgcctgaacccccaggtgcgccccgcggtgctacccacgcgttgcccccacccgggggaggcctgtgtggtgtctggctggggcctggtgtcccacaacgagcctgggaccgctgggagcccccggtcacaagggtgactctgggggacccctggtctgtgggggcatcctgcagggcattgtgtcctggggtgacgtcccttgtgacaacaccaccaagcctggtgtctataccaaagtctgccactacttggagtggatcagggaaaccatgaagaggaactgactattctagcctatctcctgtgcccctgactgagcagaagcccccacagctggccagcagccccgcctgacatggaacagaacggagccatcccccaagaccctgtccaaggcccagatgttagccaaggacttgtcccacctgaggacaaagctggcgctcaaggtcacctgtttaatgccaagataacaaagcgctgatccaagttgctctgtaggaatttctgtgacttttttctggggtcaaagagaaaccccgagacactgtacactgttccttttcacccaccaccccgatccctaggtgaggagaagcggcttgaagcagggctccattcattcaacacacatgaccacccgtgtgatcttgaacaagaggcccaatctcacttcgccttggtttccttatctgtaaaatgagaccatcttattgctgacttcaaagggctgttgtgaggattaaatgagatgattcgtctgaactgattaaaatcgtgtctggcactga

SEQ ID NO: 90 - protein, 161 aa, Homo sapiens
  kallikrein hK15 isoform 2
MWLLLTLSFLLASTAAQDGDKLLEGDECAPHSQPWQVALYERGRFNCGASLISPHWVLSAAHCQSRFMRVRLGEHNLRKRDGPEQLRTTSRVIPHPRYEARSHRNDIMLLRLVQPARLNPQVRPAVLPTRCPHPGEACVVSGWGLVSHNEPGTAGSPRSQG

SEQ ID NO: 91 - DNA, 1054 bp, Homo sapiens
  kallikrein hK15 transcript variant 3
actgcagccgaaccctggtccctcctccacaatgtggcttctcctcactctctccttcctgctggcatccacagcagcccaggatggtgacaagttgctggaaggtgacgagtgtgcaccccactcccagccatggcaagtggctctctacgagcgtggacgctttaactgtggcgcttccctcatctccccacactgggtgctgtctgcggcccactgccaaagccgcttcatgagagtgcgcctgggagagcacaacctgcgcaagcgcgatggcccagagcaactacggaccacgtctcgggtcattccacacccgcgctacgaagcgcgcagccaccgcaacgacatcatgttgctgcgcctagtccagcccgcacgcctgaacccccagggtgactctgggggacccctggtctgtgggggcatcctgcagggcattgtgtcctggggtgacgtcccttgtgacaacaccaccaagcctggtgtctataccaaagtctgccactacttggagtggatcagggaaaccatgaagaggaactgactattctagcctatctcctgtgcccctgactgagcagaagcccccacagctggccagcagccccgcctgacatggaacagaacggagccatcccccaagaccctgtccaaggcccagatgttagccaaggacttgtcccacctgaggacaaagctggcgctcaaggtcacctgtttaatgccaagataacaaagcgctgatccaagttgctctgtaggaatttctgtgacttttttctggggtcaaagagaaaccccgagacactgtacactgttccttttcacccaccaccccgatccctaggtgaggagaagcggcttgaagcagggctccattcattcaacacacatgaccacccgtgtgatcttgaacaagaggcccaatctcacttcgccttggtttccttatctgtaaaatgagaccatcttattgctgacttcaaagggctgttgtgaggattaaatgagatgattcgtctgaactgattaaaatcgtgtctggcactga

SEQ ID NO: 92 - protein, 171 aa, Homo sapiens
  kallikrein hK15 isoform 3
MWLLLTLSFLLASTAAQDGDKLLEGDECAPHSQPWQVALYERGRFNCGASLISPHWVLSAAHCQSRFMRVRLGEHNLRKRDGPEQLRTTSRVIPHPRYEARSHRNDIMLLRLVQPARLNPQGDSGGPLVCGGILQGIVSWGDVPCDNTTKPGVYTKVCHYLEWIRETMKRN

SEQ ID NO: 93 - DNA, 1309 bp, Homo sapiens
  kallikrein hK15 transcript variant 4
actgcagccgaaccctggtccctcctccacaatgtggcttctcctcactctctccttcctgctggcatccacagcagcccaggatggtgacaagttgctggaaggtgacgagtgtgcaccccactcccagccatggcaagtggctctctacgagcgtggacgctttaactgtggcgcttccctcatctccccacactgggtgctgtctgcggcccactgccaaagccgcttcatgagagtgcgcctgggagagcacaacctgcgcaagcgcgatggcccagagcaactacggaccacgtctcgggtcattccacacccgcgctacgaagcgcgcagccaccgcaacgacatcatgttgctgcgcctagtccagcccgcacgcctgaacccccaggtgcgccccgcggtgctacccacgcgttgcccccacccgggggaggcctgtgtggtgtctggctggggcctggtgtcccacaacgagcctgggaccgctgggagcccccggtcacaagtgagtctcccagatacgttgcattgtgccaacatcagcattatctcggacacatcttgtgacaagagctacccagggcgcctgacaaacaccatggtgtgtgcaggcgcggagggcagaggcgcagaatcctgtgagggtgactctgggggacccctggtctgtgggggcatcctgcagggcattgtgtcctggggtgacgtcccttgtgacaacaccaccaagcctggtgtctataccaaagtctgccactacttggagtggatcagggaaaccatgaagaggaactgactattctagcctatctcctgtgcccctgactgagcagaagcccccacagctggccagcagccccgcctgacatggaacagaacggagccatcccccaagaccctgtccaaggcccagatgttagccaaggacttgtcccacctgaggacaaagctggcgctcaaggtcacctgtttaatgccaagataacaaagcgctgatccaagttgctctgtaggaatttctgtgacttttttctggggtcaaagagaaaccccgagacactgtacactgttccttttcacccaccaccccgatccctaggtgaggagaagcggcttgaagcagggctccattcattcaacacacatgaccacccgtgtgatcttgaacaagaggcccaatctcacttcgccttggtttccttatctgtaaaatgagaccatcttattgctgacttcaaagggctgttgtgaggattaaatgagatgattcgtctgaactgattaaaatcgtgtctggcactga

SEQ ID NO: 94 - protein, 256 aa, Homo sapiens
  kallikrein hK15 isoform 4
MWLLLTLSFLLASTAAQDGDKLLEGDECAPHSQPWQVALYERGRFNCGASLISPHWVLSAAHCQSRFMRVRLGEHNLRKRDGPEQLRTTSRVIPHPRYEARSHRNDIMLLRLVQPARLNPQVRPAVLPTRCPHPGEACVVSGWGLVSHNEPGTAGSPRSQVSLPDTLHCANISIISDTSCDKSYPGRLTNTMVCAGAEGRGAESCEGDSGGPLVCGGILQGIVSWGDVPCDNTTKPGVYTKVCHYLEWIRETMKRN

SEQ ID NO: 95 - DNA, 920 bp, Homo sapiens
  Mername-AA031 peptidase
cagacaggaggcgtctgtagagatatcatgaacttcaacttagctttgttttccagagactggagctaaactgggctttcaacatcatcatgaagtttatcctcctctgggccctcttgaatctgactgttgctttggcctttaatccagattacacagtcagctccactcccccttacttggtctatttgaaatctgactacttgccctgcgctggagtcctgatccacccgctttgggtgatcacagctgcacactgcaatttaccaaagcttcgggtgatattgggggttacaatcccagcagactctaatgaaaagcatctgcaagtgattggctatgagaagatgattcatcatccacacttctcagtcacttctattgatcatgacatcatgctaatcaagctgaaaacagaggctgaactcaatgactatgtgaaattagccaacctgccctaccaaactatctctgaaaataccatgtgctctgtctctacctggagctacaatgtgtgtgatatctacaaagagcccgattcactgcaaactgtgaacatctctgtaatctccaagcctcagtgtcgcgatgcctataaaacctacaacatcacggaaaatatgctgtgtgtgggcattgtgccaggaaggaggcagccctgcaaggaagtttctgctgccccggcaatctgcaatgggatgcttcaaggaatcctgtcttttgcggatggatgtgttttgagagccgatgttggcatctatgccaaaattttttactatataccctggattgaaaatgtaatccaaaataactgagctgtggcagttgtggaccatatgacacagcttgtccccatcgttcacctttagaattaaatataaattaactcctcaaaaaaaaaaaaaaaaaaaaaaaaaaaa

SEQ ID NO: 96 - protein, 241 aa, Homo sapiens
  Mername-AA031 peptidase
MKFILLWALLNLTVALAFNPDYTVSSTPPYLVYLKSDYLPCAGVLIHPLWVITAAHCNLPKLRVILGVTIPADSNEKHLQVIGYEKMIHHPHFSVTSIDHDIMLIKLKTEAELNDYVKLANLPYQTISENTMCSVSTWSYNVCDIYKEPDSLQTVNISVISKPQCRDAYKTYNITENMLCVGIVPGRRQPCKEVSAAPAICNGMLQGILSFADGCVLRADVGIYAKIFYYIPWIENVIQNN

SEQ ID NO: 97 - DNA, 2393 bp, Homo sapiens
  membrane-type mosaic serine protease
cgcccgggcaggttgagaagccaggggccaagatggatcttctcctcgacatcagctaagcctggaggactcttcccctcagagaccatggagagggacagccacgggaatgcatctccagcaagaacaccttcagctggagcatctccagcccaggcatctccagctgggacacctccaggccgggcatctccagcccaggcatctccagcccaggcatctccagctgggacacctccgggccgggcatctccagcccaggcatctccagctggtacacctccaggccgggcatctccaggccgggcatctccagcccaggcatctccagcccgggcatctccggctctggcatcactttccaggtcctcatccggcaggtcatcatccgccaggtcagcctcggtgacaacctccccaaccagagtgtaccttgttagagcaacaccagtgggggctgtacccatccgatcatctcctgccaggtcagcaccagcaaccagggccaccagggagagcccaggtacgagcctgcccaagttcacctggcgggagggccagaagcagctaccgctcatcgggtgcgtgctcctcctcattgccctggtggtttcgctcatcatcctcttccagttctggcagggccacacagggatcaggcacaaggagcagagggagagctgtcccaagcacgctgttcgctgtgacggggtggtggactgcaagctgaagagtgacgagctgggctgcgtgaggtttgactgggacaagtctctgcttaaaatctactctgggtcctcccatcagtggcttcccatctgtagcagcaactggaatgactcctactcagagaagacctgccagcagctgggtttcgagagtgctcaccggacaaccgaggttgcccacagggattttgccaacagcttctcaatcttgagatacaactccaccatccaggaaagcctccacaggtctgaatgcccttcccagcggtatatctccctccagtgttcccactgcggactgagggccatgaccgggcggatcgtgggaggggcgctggcctcggatagcaagtggccttggcaagtgagtctgcacttcggcaccacccacatctgtggaggcacgctcattgacgcccagtgggtgctcactgccgcccactgcttcttcgtgacccgggagaaggtcctggagggctggaaggtgtacgcgggcaccagcaacctgcaccagttgcctgaggcagcctccattgccgagatcatcatcaacagcaattacaccgatgaggaggacgactatgacatcgccctcatgcggctgtccaagcccctgaccctgtccgctcacatccaccctgcttgcctccccatgcatggacagacctttagcctcaatgagacctgctggatcacaggctttggcaagaccagggagacagatgacaagacatcccccttcctccgggaggtgcaggtcaatctcatcgacttcaagaaatgcaatgactacttggtctatgacagttaccttaccccaaggatgatgtgtgctggggaccttcgtgggggcagagactcctgccagggagacagcggggggcctcttgtctgtgagcagaacaaccgctggtacctggcaggtgtcaccagctggggcacaggctgtggccagagaaacaaacctggtgtgtacaccaaagtgacagaagttcttccctggatttacagcaagatggaggtaagatccctgcagcaggacactgcacccagcaggctgggaacttcctcaggtggggaccctggaggagcacccagggtgtaggcagaggtcccctcagcgtccccatattcggggggtgttctggacagggtcaaatgtgatgcctggggtcaatcccagctgtctgtgtttctttccctgcttttcttccctcagaacagagctcagcgggttgaaaaagggtggacctacaggccaggcaggcagttgctgggcagatgttctcccagaagtatttttttgtgtaaggttgcaatggactttgaaaacgtttcagtttctgcagaggattttgtgatagtctttgttatcaagcatttatgcatgggaatccgctcttcatggcctttcccagctctgtttgttttagtctttttgattttctttttgttgttgttgttgtctttttttaaaaacacaagtgactccattttaactctgacaactttcacagctgtcaccagaatgctccctgagaactaccattctttccctttcccacttaaaatatttcatcagaacctcaccactatcataaaagagtataaagtaataaaataataaaaagcgaaaaaaaaaaaaaaaaaaaaaaaaaaaaaaaa

SEQ ID NO: 98 - protein, 581 aa, Homo Sapiens
  membrane-type mosaic serine protease
MERDSHGNASPARTPSAGASPAQASPAGTPPGRASPAQASPAQASPAGTPPGRASPAQASPAGTPPGRASPGRASPAQASPARASPALASLSRSSSGRSSSARSASVTTSPTRVYLVRATPVGAVPIRSSPARSAPATRATRESPGTSLPKFTWREGQKQLPLIGCVLLLIALVVSLIILFQFWQGHTGIRHKEQRESCPKHAVRCDGVVDCKLKSDELGCVRFDWDKSLLKIYSGSSHQWLPICSSNWNDSYSEKTCRQLGFESAHRTTEVAHRDFANSFSILRYNSTIQESLHRSHCPSQRYISLQCSHCGLRAMTGRIVGGALASDSKWPWQVSLHFGTTHICGGTLIDAQWVLTAAHCFFVTREKVLEGWKVYAGTSNLHQLPEAASIAEIIINSNYTDEEDDYDIALMRLSKPLTLSAHIHPACLPMHGQTFSLNETCWITGFGKTRETDDKTSPFLREVQVNLIDFKKCNDYLVYDSYLTPRMMCAGDLHGGRDSCQGDSGGPLVCEQNNRWYLAGVTSWGTGCGQRNKPGVYTKVTEVLPWIYSKMEVRSLQQDTAPSRLGTSSGGDPGGAPRV

SEQ ID NO: 99 - protein, 148 aa, Homo sapiens
  mername-AA038 peptidase
CGKPKVVGKIYGGRDAAAGQWPWQASLLYWGSHLCGAVLIDSCWLVSTTHCFLNKSQAPKNYQVLLGNIQLYHQTQHTQKMSVHRIITHPDFEKLHPFGSDIAMLQLHLPMNFTSYIVPVCLPSRDMQLPSNVSCWITGWGMAILGGL

SEQ ID NO: 100 - DNA, 712 bp, Homo sapiens
  mername-AA128 peptidase
cacagagggctccagcgtgattgccactggttaatgacctgccacccccgcccccccaacctctggtgccgtccaaggactctgaccccagtgcagtgtctgtagggaagaggagccatggggcttcgggcaggccccatcctgcttctgctgctgtggctgctgccagaatgcggccactccaaggaggccgggaggattgtgggaggccaagacacccaggaaggacgctggccgtggcaggttggcctgtggttgacctcagtggggcatgtatgtgggggcttcctcatccacccacgctgggtgctcacagccgcccactgcttcctgagggtgactccggggggccgctggtctgccccatcaatgatacgtggatccaggccggcattgtgagctggggattcggctgtgcccggcctttccggcctggtgtctacacccaggtgctaagctacacagactggattcagagaaccctggctgaatctcactcaggcatgtctggggcccgcccaggtgccccaggatcccactcaggcacctccagatcccacccagtgctgctgcttgagctgttgaccgtatgcttgcttgggtccctgtgaaccatgagccatggagtccgggatcccctttctggtaggattgatggaatctaataataaaaactgtaggttttttatgtgaaaaaaaaaaaaaaaaaaaa

SEQ ID NO: 101 - protein, 146 aa, Homo sapiens
  mername-AA128 peptidase
MRPLQGGREDCGRPRHPGRTLAVAGWPVVDLSGACMWGLPHPPTLGAHSRPLLPEGDSGGPLVCPINDTWIQAGIVSWGFGCARPFRPGVYTQVLSYTDWIQRTLAESHSGMSGARPGAPGSHSGTSRSHPVLLLELLTVCLLGSL

SEQ ID NO: 102 - DNA, 800 bp, Homo sapiens
  cationic trypsin (Homo sapiens-type 1) (cationic)
accaccatgaatccactcctgatccttacctttgtggcagctgctcttgctgccccctttgatgatgatgacaagatcgttgggggctacaactgtgaggagaattctgtcccctaccaggtgtccctgaattctggctaccacttctgtggtggctccctcatcaacgaacagtgggtggtatcagcaggccactgctacaagtcccgcatccaggtgagactgggagagcacaacatcgaagtcctggaggggaatgagcagttcatcaatgcagccaagatcatccgccacccccaatacgacaggaagactctgaacaatgacatcatgttaatcaagctctcctcacgtgcagtaatcaacgcccgcgtgtccaccatctctctgcccaccgcccctccagccactggcacgaagtgcctcatctctggctggggcaacactgcgagctctggcgccgactacccagacgagctgcagtgcctggacgctcctgtgctgagccaggctaagtgtgaagcctcctaccctggaaagattaccagcaacatgttctgtgtgggcttccttgagggaggcaaggattcatgtcagggtgattctggtggccctgtggtctgcaatggacagctccaaggagttgtctcctggggtgatggctgtgcccagaagaacaagcctggagtctacaccaaggtctacaactatgtgaaatggattaagaacaccatagctgccaatagctaaagcccccagtatctcttcagtctctataccaataaagtgaccctgttctc

SEQ ID NO: 103 - protein, 247 aa, Homo sapiens
  cationic trypsin (Homo sapiens-type 1) (cationic)
MNPLLILTFVAAALAAPFDDDDKIVGGYNCEENSVPYQVSLNSGYHFCGGSLINEQWVVSAGHCYKSRIQVRLGEHNIEVLEGNEQFINAAKIIRHPQYDRKTLNNDIMLIKLSSRAVINARVSTISLPTAPPATGTKCLISGWGNTASSGADYPDELQCLDAPVLSQAKCEASYPGKITSNMFCVGFLEGGKDSCQGDSGGPVVCNGQLQGVVSWGDGCAQKNKPGVYTKVYNYVKWIKNTIAANS

SEQ ID NO: 104 - DNA, 938 bp, Homo sapiens
  Neutrophil elastase
gcacggaggggcagagaccccggagccccagccccaccatgaccctcggccgccgactcgcgtgtcttttcctcgcctgtgtcctgccggccttgctgctggggggcaccgcgctggcctcggagattgtggggggccggcgagcgcggccccacgcgtggcccttcatggtgtccctgcagctgcgcggaggccacttctgcggcgccaccctgattgcgcccaacttcgtcatgtcggccgcgcactgcgtggcgaatgtaaacgtccgcgcggtgcgggtggtcctgggagcccataacctctcgcggcgggagcccacccggcaggtgttcgccgtgcagcgcatcttcgaaaacggctacgaccccgtaaacttgctcaacgacatcgtgattctccagctcaacgggtcggccaccatcaacgccaacgtgcaggtggcccagctgccggctcagggacgccgcctgggcaacggggtgcagtgcctggccatgggctggggccttctgggcaggaaccgtgggatcgccagcgtcctgcaggagctcaacgtgacggtggtgacgtccctctgccgtcgcagcaacgtctgcactctcgtgaggggccggcaggccggcgtctgtttcggggactccggcagccccttggtctgcaacgggctaatccacggaattgcctccttcgtccggggaggctgcgcctcagggctctaccccgatgcctttgccccggtggcacagtttgtaaactggatcgactctatcatccaacgctccgaggacaacccctgtccccacccccgggacccggacccggccagcaggacccactgagaagggctgcccgggtcacctcagctgcccacacccacactctccagcatctggcacaataaacattctctgttttgtagaaaaaaaaaaaaaaaa

SEQ ID NO: 105 - protein, 267 aa, Homo sapiens
  Neutrophil elastase
MTLGRRLACLFLACVLPALLLGGTALASEIVGGRRARPHAWPFMVSLQLRGGHFCGATLIAPNFVMSAAHCVANVNVRAVRVVLGAHNLSRREPTRQVFAVQRIFENGYDPVNLLNDIVILQLNGSATINANVQVAQLPAQGRRLGNGVQCLAMGWGLLGRNRGIASVLQELNVTVVTSLCRRSNVCTLVRGRQAGVCFGDSGSPLVCNGLIHGIASFVRGGCASGLYPDAFAPVAQFVNWIDSIIQRSEDNPCPHPRDPDPASRTH

SEQ ID NO: 106 - DNA, 3895 bp, Homo sapiens
  mannan-binding lectin-associated serine protease-3
attccggcacagggacacaaacaagctcacccaacaaagccaagctgggaggaccaaggccgggcagccgggagcacccaaggcaggaaaatgaggtggctgcttctctattatgctctgtgcttctccctgtcaaaggcttcagcccacaccgtggagctaaacaatatgtttggccagatccagtcgcctggttatccagactcctatcccagtgattcagaggtgacttggaatatcactgtcccagatgggtttcggatcaagctttacttcatgcacttcaacttggaatcctcctacctttgtgaatatgactatgtgaaggtagaaactgaggaccaggtgctggcaaccttctgtggcagggagaccacagacacagagcagactcccggccaggaggtggtcctctcccctggctccttcatgtccatcactttccggtcagatttctccaatgaggagcgtttcacaggctttgatgcccactacatggctgtggatgtggacgagtgcaaggagagggaggacgaggagctgtcctgtgaccactactgccacaactacattggcggctactactgctcctgccgcttcggctacatcctccacacagacaacaggacctgccgagtggagtgcagtgacaacctcttcactcaaaggactggggtgatcaccagccctgacttcccaaacccttaccccaagagctctgaatgcctgtataccatcgagctggaggagggtttcatggtcaacctgcagtttgaggacatatttgacattgaggaccatcctgaggtgccctgcccctatgactacatcaagatcaaagttggtccaaaagttttggggcctttctgtggagagaaagccccagaacccatcagcacccagagccacagtgtcctgatcctgttccatagtgacaactcgggagagaaccggggctggaggctctcatacagggctgcaggaaatgagtgcccagagctacagcctcctgtccatgggaaaatcgagccctcccaagccaagtatttcttcaaagaccaagtgctcgtcagctgtgacacaggctacaaagtgctgaaggataatgtggagatggacacattccagattgagtgtctgaaggatgggacgtggagtaacaagattcccacctgtaaaattgtagactgtagagccccaggagagctggaacacgggctgatcaccttctctacaaggaacaacctcaccacatacaagtctgagatcaaatactcctgtcaggagccctattacaagatgctcaacaataacacaggtatatatacctgttctgcccaaggagtctggatgaataaagtattggggagaagcctacccacctgccttccagagtgtggtcagccctcccgctccctgccaagcctggtcaagaggatcattgggggccgaaatgctgagcctggcctcttcccgtggcaggccctgatagtggtggaggacacttcgagagtgccaaatgacaagtggtttgggagtggggccctgctctctgcgtcctggatcctcacagcagctcatgtgctgcgctcccagcgtagagacaccacggtgataccagtctccaaggagcatgtcaccgtctacctgggcttgcatgatgtgcgagacaaatcgggggcagtcaacagctcagctgcccgagtggtgctccacccagacttcaacatccaaaactacaaccacgatatagctctggtgcagctgcaggagcctgtgcccctgggaccccacgttatgcctgtctgcctgccaaggcttgagcctgaaggcccggccccccacatgctgggcctggtggccggctggggcatctccaatcccaatgtgacagtggatgagatcatcagcagtggcacacggaccttgtcagatgtcctgcagtatgtcaagttacccgtggtgcctcacgctgagtgcaaaactagctatgagtcccgctcgggcaattacagcgtcacggagaacatgttctgtgctggctactacgagggcggcaaagacacgtgccttggagatagcggtggggcctttgtcatctttgatgacttgagccagcgctgggtggtgcaaggcctggtgtcctgggggggacctgaagaatgcggcagcaagcaggtctatggagtctacacaaaggtctccaattacgtggactgggtgtgggagcagatgggcttaccacaaagtgttgtggagccccaggtggaacggtgagctgacttacttcctcggggcctgcctcccctgagcgaagctacaccgcacttccgacagcacactccacattacttatcagaccatatggaatggaacacactgacctagcggtggcttctcctaccgagacagcccccaggaccctgagaggcagagtgtggtatagggaaaaggctccaggcaggagacctgtgttcctgagcttgtccaagtctctttccctgtctgggcctcactctaccgagtaatacaatgcaggagctcaaccaaggcctctgtgccaatcccagcactcctttccaggccatgcttcttaccccagtggcctttattcactcctgaccacttatcaaacccatcggtcctactgttggtataactgagcttggacctgactattagaaaatggtttctaacattgaactgaatgccgcatctgtatattttcctgctctgccttctgggactagccttggcctaatccttcctctaggagaagagcattcaggttttgggagatggctcatagccaagcccctctctcttagtgtgatcccttggagcaccttcatgcctggggtttctctcccaaaagcttcttgcagtctaagccttatcccttatgttccccattaaaggaatttcaaaagacatggagaaagttgggaaggtttgtgctgactgctgggagcagaatagccgtgggaggcccaccaagcccttaaattcccattgtcaactcagaacacatttgggcccatatgccaccctggaacaccagctgacaccatgggcgtccacacctgctgctccagacaagcacaaagcaatctttcagccttgaaatgtattatctgaaaggctacctgaagcccaggcccgaatatggggacttagtcgattacctggaaaaagaaaagacccacactgtgtcctgctgtgcttttgggcaggaaaatggaagaaagagtggggtgggcacattagaagtcacccaaatcctgccaggctgcctggcatccctggggcatgagctgggcggagaatccaccccgcaggatgttcagagggacccactccttcatttttcagagtcaaaggaatcagaggctcacccatggcaggcagtgaaaagagccaggagtcctgggttctagtccctgctctgcccccaactggctgtataacctttgaaaaatcattttctttgtctgagtctctggttctccgtcagcaacaggctggcataaggtcccctgcaggttccttctagctggagcactcagagcttccctgactgctagcagcctctctggccctcacagggctgattgttctccttctccctggagctctctctcctgaaaatctccatcagagcaaggcagccagagaagcccctgagagggaatgattgggaagtgtccactttctcaaccggctcatcaaacacactcctttgtctatgaatggcacatgtaaatgatgttatattttgtatcttttatatcatatgcttcaccattctgtaaagggcctctgcattgttgctcccatcaggggtctcaagtggaaataaaccctcgtggataaccaaaaaaaaaaaaaaaaaaaa

SEQ ID NO: 107 - protein, 728 aa, Homo sapiens
  mannan-binding lectin-associated serine protease-3
MRWLLLYYALCFSLSKASAHTVELNNMFGQIQSPGYPDSYPSDSEVTWNITVPDGFRIKLYFMHFNLESSYLCEYDYVKVETEDQVLATFCGRETTDTEQTPGQEVVLSPGSFMSITFRSDFSNEERFTGFDAHYMAVDVDECKEREDEELSCDHYCHNYIGGYYCSCRFGYILHTDNRTCRVECSDNLFTQRTGVITSPDFPNPYPKSSECLYTIELEEGFMVNLQFEDIFDIEDHPEVPCPYDYIKIKVGPKVLGPFCGEKAPEPISTQSHSVLILFHSDNSGENRGWRLSYRAAGNECPELQPPVHGKIEPSQAKYFFKDQVLVSCDTGYKVLKDNVEMDTFQIECLKDGTWSNKIPTCKIVDCRAPGELEHGLITFSTRNNLTTYKSEIKYSCQEPYYKMLNNNTGIYTCSAQGVWMNKVLGRSLPTCLPECGQPSRSLPSLVKRIIGGRNAEPGLFPWQALIVVEDTSRVPNDKWFGSGALLSASWILTAAHVLRSQRRDTTVIPVSKEHVTVYLGLHDVRDKSGAVNSSAARVVLHPDFNIQNYNHDIALVQLQEPVPLGPHVMPVCLPRLEPEGPAPHMLGLVAGWGISNPNVTVDEIISSGTRTLSDVLQYVKLPVVPHAECKTSYESRSGNYSVTENMFCAGYYEGGKDTCLGDSGGAFVIFDDLSQRWVVQGLVSWGGPEECGSKQVYGVYTKVSNYVDWVWEQMGLPQSVVEPQVER

SEQ ID NO: 108 - DNA, 924 bp, Homo sapiens
  cathepsin G
gcacagcagcaactgactgggcagcctttcaggaaagatgcagccactcctgcttctgctggcctttctcctacccactggggctgaggcaggggagatcatcggaggccgggagagcaggccccactcccgcccctacatggcgtatcttcagatccagagtccagcaggtcagagcagatgtggagggttcctggtgcgagaagactttgtgctgacagcagctcattgctggggaagcaatataaatgtcaccctgggcgcccacaatatccagagacgggaaaacacccagcaacacatcactgcgcgcagagccatccgccaccctcaatataatcagcggaccatccagaatgacatcatgttattgcagctgagcagaagagtcagacggaatcgaaacgtgaacccagtggctctgcctagagcccaggagggactgagacccgggacgctgtgcactgtggccggctggggcagggtcagcatgaggaggggaacagatacactccgagaggtgcagctgagagtgcagagggataggcagtgcctccgcatcttcggttcctacgacccccgaaggcagatttgtgtgggggaccggcgggaacggaaggctgccttcaagggggattccggaggccccctgctgtgtaacaatgtggcccacggcatcgtctcctatggaaagtcgtcaggggttcctccagaagtcttcaccagggtctcaagtttcctgccctggataaggacaacaatgagaagcttcaaactgctggatcagatggagacccccctgtgactgactcttcttctcggggacacaggccagctccacagtgttgccagagccttaataaacgtccacagagtataaataaccaattcctcatttgttcattaaacgtcattcagtactta

SEQ ID NO: 109 - protein, 255 aa, Homo sapiens
  cathepsin G
MQPLLLLLAFLLPTGAEAGEIIGGRESRPHSRPYMAYLQIQSPAGQSRCGGFLVREDFVLTAAHCWGSNINVTLGAHNIQRRENTQQHITARRAIRHPQYNQRTIQNDIMLLQLSRRVRRNRNVNPVALPRAQEGLRPGTLCTVAGWGRVSMRRGTDTLREVQLRVQRDRQCLRIFGSYDPRRQICVGDRRERKAAFKGDSGGPLLCNNVAHGIVSYGKSSGVPPEVFTRVSSFLPWIRTTMRSFKLLDQMETPL

SEQ ID NO: 110 - DNA, 1001 bp, Homo sapiens
  myeloblastin (proteinase 3)
cgtgggtgcaccctggaccccaccatggctcaccggccccccagccctgccctggcgtccgtgctgctggccttgctgctgagcggtgctgcccgagctgcggagatcgtgggcgggcacgaggcgcagccacactcccggccctacatggcctccctgcagatgcgggggaacccgggcagccacttctgcggaggcaccttgatccaccccagcttcgtgctgacggccgcgcactgcctgcgggacataccccagcgcctggtgaacgtggtgctcggagcccacaacgtgcggacgcaggagcccacccagcagcacttctcggtggctcaggtgtttctgaacaactacgacgcggagaacaaactgaacgacgttctcctcatccagctgagcagcccagccaacctcagtgcctccgtcgccacagtccagctgccacagcaggaccagccagtgccccacggcacccagtgcctggccatgggctggggccgcgtgggtgcccacgaccccccagcccaggtcctgcaggagctcaatgtcaccgtggtcaccttcttctgccggccacataacatttgcactttcgtccctcgccgcaaggccggcatctgcttcggagactcaggtggccccctgatctgtgatggcatcatccaaggaatagactccttcgtgatctggggatgtgccacccgccttttccctgacttcttcacgcgggtagccctctacgtggactggatccgttccacgctgcgccgtgtggaggccaagggccgcccctgaaccgcccctcccacagcgctggccgggaccccgagcctggctccaaaccctcgaggcggatctttggacagaagcagctcttccccgaacactgtggcgtccgggacggccccacccgtccccccacactccctcccacggggctccgggagacaggccggccctgcacctcaccccaccgtgacctcaataaacgttgaaactcc

SEQ ID NO: 111 - protein, 256 aa, Homo sapiens
  myeloblastin (proteinase 3)
MAHRPPSPALASVLLALLLSGAARAAEIVGGHEAQPHSRPYMASLQMRGNPGSHFCGGTLIHPSFVLTAAHCLRDIPQRLVNVVLGAHNVRTQEPTQQHFSVAQVFLNNYDAENKLNDVLLIQLSSPANLSASVATVQLPQQDQPVPHGTQCLAMGWGRVGAHDPPAQVLQELNVTVVTFFCRPHNICTFVPRRKAGICFGDSGGPLICDGIIQGIDSFVIWGCATRLFPDFFTRVALYVDWIRSTLRRVEAKGRP

SEQ ID NO: 112 - DNA, 878 bp, Homo sapiens
  granzyme A
cagattttcaggttgattgatgtgggacagcagccacaatgaggaactcctatagatttctggcatcctctctctcagttgtcgtttctctcctgctaattcctgaagatgtctgtgaaaaaattattggaggaaatgaagtaactcctcattcaagaccctacatggtcctacttagtcttgacagaaaaaccatctgtgctggggctttgattgcaaaagactgggtgttgactgcagctcactgtaacttgaacaaaaggtcccaggtcattcttggggctcactcaataaccagggaagagccaacaaaacagataatgcttgttaagaaagagtttccctatccatgctatgacccagccacacgcgaaggtgaccttaaacttttacagctgacggaaaaagcaaaaattaacaaatatgtgactatccttcatctacctaaaaagggggatgatgtgaaaccaggaaccatgtgccaagttgcagggtgggggaggactcacaatagtgcatcttggtccgatactctgagagaagtcaatatcaccatcatagacagaaaagtctgcaatgatcgaaatcactataattttaaccctgtgattggaatgaatatggtttgtgctggaagcctccgaggtggaagagactcgtgcaatggagattctggaagccctttgttgtgcgagggtgttttccgaggggtcacttcctttggccttgaaaataaatgcggagaccctcgtgggcctggtgtctatattcttctctcaaagaaacacctcaactggataattatgactatcaagggagcagtttaaataaccgtttcctttcatttactgtggcttcttaatcttttcacaaataaa

SEQ ID NO: 113 - protein, 262 aa, Homo sapiens
  granzyme A
MRNSYRFLASSLSVVVSLLLIPEDVCEKIIGGNEVTPHSRPYMVLLSLDRKTICAGALIAKDWVLTAAHCNLNKRSQVILGAHSITREEPTKQIMLVKKEFPYPCYDPATREGDLKLLQLTEKAKINKYVTILHLPKKGDDVKPGTMCQVAGWGRTHNSASWSDTLREVNITIIDRKVCNDRNHYNFNPVIGMNMVCAGSLRGGRDSCNGDSGSPLLCEGVFRGVTSFGLENKCGDPRGPGVYILLSKKHLNWIIMTIKGAV

SEQ ID NO: 114 - DNA, 947 bp, Homo sapiens
  granzyme M
ggctcggggccggggccagcacccacactgggtctccacagcggcatggaggcctgcgtgtcttcactgctggtgctggccctgggggccctgtcagtaggcagctcctttgggacccagatcatcgggggccgggaggtgatcccccactcgcgcccgtacatggcctcactgcagagaaatggctcccacctgtgcgggggtgtcctggtgcacccaaagtgggtgctgacggctgcccactgcctggcccagcggatggcccagctgaggctggtgctggggctccacaccctggacagccccggtctcaccttccacatcaaggcagccatccagcaccctcgctacaagcccgtccctgccctggagaacgacctcgcgctgcttcagctggacgggaaagtgaagcccagccggaccatccggccgttggccctgcccagtaagcgccaggtggtggcagcagggactcggtgcagcatggccggctgggggctgacccaccagggcgggcgcctgtcccgggtgctgcgggagctggacctccaagtgctggacacccgcatgtgtaacaacagccgcttctggaacggcagcctctcccccagcatggtctgcctggcggccgactccaaggaccaggctccctgcaagggtgactcgggcgggcccctggtgtgtggcaaaggccgggtgttggccggagtcctgtccttcagctccagggtctgcactgacatcttcaagcctcccgtggccaccgctgtggcgccttacgtgtcctggatcaggaaggtcaccggccgatcggcctgatgccctggggtgatggggaccccctcgctgtctccacaggacccttcccctccaggggtgcagtggggtgggtgaggacgggtgggagggacagggagggaccaataaatcataatgaagaaacgctc

SEQ ID NO: 115 - protein, 257 aa, Homo sapiens
  granzyme M
MEACVSSLLVLALGALSVGSSFGTQIIGGREVIPHSRPYMASLQRNGSHLCGGVLVHPKWVLTAAHCLAQRMAQLRLVLGLHTLDSPGLTFHIKAAIQHPRYKPVPALENDLALLQLDGKVKPSRTIRPLALPSKRQVVAAGTRCSMAGWGLTHQGGRLSRVLRELDLQVLDTRMCNNSRFWNGSLSPSMVCLAADSKDQAPCKGDSGGPLVCGKGRVLAGVLSFSSRVCTDIFKPPVATAVAPYVSWIRKVTGRSA

SEQ ID NO: 116 - DNA, 784 bp, Homo sapiens
  chymase (human-type)
agcatttgctcaggcagcctctctgggaagatgctgcttcttcctctccccctgctgctctttctcttgtgctccagagctgaagctggggagatcatcgggggcacagaatgcaagccacattcccgcccctacatggcctacctggaaattgtaacttccaacggtccctcaaaattttgtggtggtttccttataagacggaactttgtgctgacggctgctcattgtgcaggaaggtctataacagtcacccttggagcccataacataacagaggaagaagacacatggcagaagcttgaggttataaagcaattccgtcatccaaaatataacacttctactcttcaccacgatatcatgttactaaagttgaaggagaaagccagcctgaccctggctgtggggacactccccttcccatcacaattcaactttgtcccacctgggagaatgtgccgggtggctggctggggaagaacaggtgtgttgaagccgggctcagacactctgcaagaggtgaagctgagactcatggatccccaggcctgcagccacttcagagactttgaccacaatcttcagctgtgtgtgggcaatcccaggaagacaaaatctgcatttaagggagactctgggggccctcttctgtgtgctggggtggcccagggcatcgtatcctatggacggtcggatgcaaagccccctgctgtcttcacccgaatctcccattaccggccctggatcaaccagatcctgcaggcaaattaatcctggatcc

SEQ ID NO: 117 - protein, 247 aa, Homo sapiens
  chymase (human-type)
MLLLPLPLLLFLLCSRAEAGEIIGGTECKPHSRPYMAYLEIVTSNGPSKFCGGFLIRRNFVLTAAHCAGRSITVTLGAHNITEEEDTWQKLEVIKQFRHPKYNTSTLHHDIMLLKLKEKASLTLAVGTLPFPSQFNFVPPGRMCRVAGWGRTGVLKPGSDTLQEVKLRLMDPQACSHFRDFDHNLQLCVGNPRKTKSAFKGDSGGPLLCAGVAQGIVSYGRSDAKPPAVFTRISHYRPWINQILQAN

SEQ ID NO: 118 - DNA, 1194 bp, Homo sapiens; identical to SEQ ID NO: 47
  tryptase alpha (1)

SEQ ID NO: 119 - protein, 275 aa, Homo sapiens; identical to SEQ ID NO: 48
  tryptase alpha (1)

SEQ ID NO: 120 - DNA, 1074 bp, Homo sapiens
  granzyme K
gatcaacacatttcatctgggcttcttaaatctaaatctttaaaatgactaagttttcttccttttctctgtttttcctaatagttggggcttatatgactcatgtgtgtttcaatatggaaattattggagggaaagaagtgtcacctcattccaggccatttatggcctccatccagtatggcggacatcacgtttgtggaggtgttctgattgatccacagtgggtgctgacagcagcccactgccaatatcggtttaccaaaggccagtctcccactgtggttttaggcgcacactctctctcaaagaatgaggcctccaaacaaacactggagatcaaaaaatttataccattctcaagagttacatcagatcctcaatcaaatgatatcatgctggttaagcttcaaacagccgcaaaactcaataaacatgtcaagatgctccacataagatccaaaacctctcttagatctggaaccaaatgcaaggttactggctggggagccaccgatccagattcattaagaccttctgacaccctgcgagaagtcactgttactgtcctaagtcgaaaactttgcaacagccaaagttactacaacggcgacccttttatcaccaaagacatggtctgtgcaggagatgccaaaggccagaaggattcctgtaagggtgactcagggggccccttgatctgtaaaggtgtcttccacgctatagtctctggaggtcatgaatgtggtgttgccacaaagcctggaatctacaccctgttaaccaagaaataccagacttggatcaaaagcaaccttgtcccgcctcatacaaattaagttacaaataattttattggatgcacttgcttcttttttcctaatatgctcgcaggttagagttgggtgtaagtaaagcagagcacatatggggtccatttttgcacttgtaagtcattttattaaggaatcaagttctttttcacttgtatcactgatgtatttctaccatgctggttttattctaaataaaatttagaagactcaaaaaaaaaaaaaaaaaaaaaaaaaaaaa

SEQ ID NO: 121 - protein, 264 aa, Homo sapiens
  granzyme K
MTKFSSFSLFFLIVGAYMTHVCFNMEIIGGKEVSPHSRPFMASIQYGGHHVCGGVLIDPQWVLTAAHCQYRFTKGQSPTVVLGAHSLSKNEASKQTLEIKKFIPFSRVTSDPQSNDIMLVKLQTAAKLNKHVKMLHIRSKTSLRSGTKCKVTGWGATDPDSLRPSDTLREVTVTVLSRKLCNSQSYYNGDPFITKDMVCAGDAKGQKDSCKGDSGGPLICKGVFHAIVSGGHECGVATKPGIYTLLTKKYQTWIKSNLVPPHTN

SEQ ID NO: 122 - DNA, 1047 bp, Homo sapiens
  granzyme H
ggagtcaacaccaacagctctgacctgggcagccttcctgagaaaatgcagccattcctcctcctgttggcctttcttctgacccctggggctgggacagaggagatcatcgggggccatgaggccaagccccactcccgcccctacatggcctttgttcagtttctgcaagagaagagtcggaagaggtgtggcggcatcctagtgagaaaggactttgtgctgacagctgctcactgccagggaagctccataaatgtcaccttgggggcccacaatatcaaggaacaggagcggacccagcagtttatccctgtgaaaagacccatcccccatccagcctataatcctaagaacttctccaacgacatcatgctactgcagctggagagaaaggccaagtggaccacagctgtgcggcctctcaggctacctagcagcaaggcccaggtgaagccagggcagctgtgcagtgtggctggctggggttatgtctcaatgagcactttagcaaccacactgcaggaagtgttgctgacagtgcagaaggactgccagtgtgaacgtctcttccatggcaattacagcagagccactgagatttgtgtgggggatccaaagaagacacagaccggtttcaagggggactccggggggcccctcgtgtgtaaggacgtagcccaaggtattctctcctatggaaacaaaaaagggacacctccaggagtctacatcaaggtctcacacttcctgccctggataaagagaacaatgaagcgcctctaacagcaggcatgagactaaccttcctctgggcctgaccatctctgggacagaggcaagaatccccaaggggtgggcagtcagggttgcaggactgtaataaatggatctctggtgtagaaaaaaaaaaaaaaaaaaaaaaaaaaaaaaaaaaaaaaaaaaaaaaaaaaaaaaaaaaaaaaaaaaaaaaaaaaaaaaaaaaaaaaaaaaaaaaaaaaaaaaaaaaaaaaaaaaaaaaaaaaaaaaaaaaaaaaaaaaaaaaaa

SEQ ID NO: 123 - protein, 246 aa, Homo sapiens
  granzyme H
MQPFLLLLAFLLTPGAGTEEIIGGHEAKPHSRPYMAFVQFLQEKSRKRCGGILVRKDFVLTAAHCQGSSINVTLGAHNIKEQERTQQFIPVKRPIPHPAYNPKNFSNDIMLLQLERKAKWTTAVRPLRLPSSKAQVKPGQLCSVAGWGYVSMSTLATTLQEVLLTVQKDCQCERLFHGNYSRATEICVGDPKKTQTGFKGDSGGPLVCKDVAQGILSYGNKKGTPPGVYIKVSHFLPWIKRTMKRL

SEQ ID NO: 124 - DNA, 865 bp, Homo sapiens
  chymotrypsin B
ccctgccagcggcaccatggctttcctctggctcctctcctgctgggccctcctgggtaccaccttcggctgcggggtccccgccatccaccctgtgctcagcggcctgtccaggatcgtgaatggggaggacgccgtccccggctcctggccctggcaggtgtccctgcaggacaaaaccggcttccacttctgcgggggctccctcatcagcgaggactgggtggtcaccgctgcccactgcggggtcaggacctccgacgtggtcgtggctggggagtttgaccagggctctgacgaggagaacatccaggtcctgaagatcgccaaggtcttcaagaaccccaagttcagcattctgaccgtgaacaatgacatcaccctgctgaagctggccacacctgcccgcttctcccagacagtgtccgccgtgtgcctgcccagcgccgacgacgacttccccgcggggacactgtgtgccaccacaggctggggcaagaccaagtacaacgccaacaagacccctgacaagctgcagcaggcagccctgcccctcctgtccaatgccgaatgcaagaagtcctggggcaggaggatcaccgacgtgatgatctgtgccggggccagtggcgtctcctcctgcatgggcgactctggcggtcccctggtctgccaaaaggatggagcctggaccctggtgggcattgtgtcctggggcagcgacacctgctccacctccagccctggcgtgtacgcccgtgtcaccaagctcataccttgggtgcagaagatcctggctgccaactgagcccgcggctccctccgaccctgctccccacagagcctcagtaaacccatggaacac

SEQ ID NO: 125 - protein, 263 aa, Homo sapiens
  chymotrypsin B
MAFLWLLSCWALLGTTFGCGVPAIHPVLSGLSRIVNGEDAVPGSWPWQVSLQDKTGFHFCGGSLISEDWVVTAAHCGVRTSDVVVAGEFDQGSDEENIQVLKIAKVFKNPKFSILTVNNDITLLKLATPARFSQTVSAVCLPSADDDFPAGTLCATTGWGKTKYNANKTPDKLQQAALPLLSNAECKKSWGRRITDVMICAGASGVSSCMGDSGGPLVCQKDGAWTLVGIVSWGSDTCSTSSPGVYARVTKLIPWVQKILAAN

SEQ ID NO: 126 - DNA, 952 bp, Homo sapiens
  pancreatic elastase
ttggtccaagcaagaaggcagtggtctactccatcggcaacatgctggtcctttatggacacagcacccaggaccttccggaaaccaatgcccgcgtagtcggagggactgaggccgggaggaattcctggccctctcagatttccctccagtaccggtctggaggttcccggtatcacacctgtggagggacccttatcagacagaactgggtgatgacagctgctcactgcgtggattaccagaagactttccgcgtggtggctggagaccataacctgagccagaatgatggcactgagcagtacgtgagtgtgcagaagatcgtggtgcatccatactggaacagcgataacgtggctgccggctatgacatcgccctgctgcgcctggcccagagcgttaccctcaatagctatgtccagctgggtgttctgccccaggagggagccatcctggctaacaacagtccctgctacatcacaggctggggcaagaccaagaccaatgggcagctggcccagaccctgcagcaggcttacctgccctctgtggactacgccatctgctccagctcctcctactggggctccactgtgaagaacaccatggtgtgtgctggtggagatggagttcgctctggatgccagggtgactctgggggccccctccattgcttggtgaatggcaagtattctgtccatggagtgaccagctttgtgtccagccggggctgtaatgtctccaggaagcctacagtcttcacccaggtctctgcttacatctcctggataaataatgtcatcgcctccaactgaacattttcctgagtccaacgaccttcccaaaatggttcttagatctgcaataggacttgcgatcaaaaagtaaaacacattctgaaagactattgagccattgatagaaaagcaaataaaactagatatacatt

SEQ ID NO: 127 - protein, 258 aa, Homo sapiens
  pancreatic elastase
MLVLYGHSTQDLPETNARVVGGTEAGRNSWPSQISLQYRSGGSRYHTCGGTLIRQNWVMTAAHCVDYQKTFRVVAGDHNLSQNDGTEQYVSVQKIVVHPYWNSDNVAAGYDIALLRLAQSVTLNSYVQLGVLPQEGAILANNSPCYITGWGKTKTNGQLAQTLQQAYLPSVDYAICSSSSYWGSTVKNTMVCAGGDGVRSGCQGDSGGPLHCLVNGKYSVHGVTSFVSSRGCNVSRKPTVFTQVSAYISWINNVIASN

SEQ ID NO: 128 - DNA, 963 bp, Homo sapiens
  pancreatic endopeptidase E (A)
tcctatcatcacaaaactcatgatgctccggctgctcagttccctcctccttgtggccgttgcctcaggctatggcccaccttcctctcactcttccagccgcgttgtccatggtgaggatgcggtcccctacagctggccctggcaggtttccctgcagtatgagaaaagtggaagcttctaccacacgtgtggcggtagcctcatcgcccccgattgggttgtgactgccggccactgcatctcgagggatctgacctaccaggtggtgttgggtgagtacaaccttgctgtgaaggagggccccgagcaggtgatccccatcaactctgaggagctgtttgtgcatccactctggaaccgctcgtgtgtggcctgtggcaatgacatcgccctcatcaagctctcacgcagcgcccagctgggagatgccgtccagctcgcctcactccctcccgctggtgacatccttcccaacaagacaccctgctacatcaccggctggggccgtctctataccaatgggccactcccagacaagctgcagcaggcccggctgcccgtggtggactataagcactgctccaggtggaactggtggggttccaccgtgaagaaaaccatggtgtgtgctggagggtacatccgctccggctgcaacggtgactctggaggacccctcaactgccccacagaggatggtggctggcaggtccacggtgtgaccagctttgtttctggctttggctgcaacttcatctggaagcccacggtgttcactcgagtctccgccttcatcgactggattgaggagaccatagcaagccactagaaccaaggcccagctggcagtgctgatcgatcccacatcctgaataaagaataaagatctctcagaaaattccaaaaaaaaaaaaaaaaaaaaaaaaaaaaaaaaaaaaaaaaaaaaaaaaaaaaaaaaaa

SEQ ID NO: 129 - protein, 270 aa, Homo sapiens
  pancreatic endopeptidase E (A)
MMLRLLSSLLLVAVASGYGPPSSHSSSRVVHGEDAVPYSWPWQVSLQYEKSGSFYHTCGGSLIAPDWVVTAGHCISRDLTYQVVLGEYNLAVKEGPEQVIPINSEELFVHPLWNRSCVACGNDIALIKLSRSAQLGDAVQLASLPPAGDILPNKTPCYITGWGRLYTNGPLPDKLQQARLPVVDYKHCSRWNWWGSTVKKTMVCAGGYIRSGCNGDSGGPLNCPTEDGGWQVHGVTSFVSGFGCNFIWKPTVFTRVSAFIDWIEETIASH

SEQ ID NO: 130 - DNA, 914 bp, Homo sapiens
  pancreatic elastase II (IIA)
ttttacagaactcccacggacacaccatgataaggacgctgctgctgtccactttggtggctggagccctcagttgtggggaccccacttacccaccttatgtgactagggtggttggcggtgaagaagcgaggcccaacagctggccctggcaggtctccctgcagtacagctccaatggcaagtggtaccacacctgcggagggtccctgatagccaacagctgggtcctgacggctgcccactgcatcagctcctccaggacctaccgcgtggggctgggccggcacaacctctacgttgcggagtccggctcgctggcagtcagtgtctctaagattgtggtgcacaaggactggaactccaaccaaatctccaaagggaacgacattgccctgctcaaactggctaaccccgtctccctcaccgacaagatccagctggcctgcctccctcctgccggcaccattctacccaacaactacccctgctacgtcacgggctggggaaggctgcagaccaacggggctgttcctgatgtcctgcagcagggccggttgctggttgtggactatgccacctgctccagctctgcctggtggggcagcagcgtgaaaaccagtatgatctgtgctgggggtgatggcgtgatctccagctgcaacggagactctggcgggccactgaactgtcaggcgtctgacggccggtggcaggtgcacggcatcgtcagcttcgggtctcgcctcggctgcaactactaccacaagccctccgtcttcacgcgggtctccaattacatcgactggatcaattcggtgattgcaaataactaaccaaaagaagtccctgggactgtttcagacttggaaaggtcacagaaggaaaataatataataaagtgacaactatgc

SEQ ID NO: 131 - protein, 269 aa, Homo sapiens
  pancreatic elastase II (IIA)
MIRTLLLSTLVAGALSCGDPTYPPYVTRVVGGEEARPNSWPWQVSLQYSSNGKWYHTCGGSLIANSWVLTAAHCISSSRTYRVGLGRHNLYVAESGSLAVSVSKIVVHKDWNSNQISKGNDIALLKLANPVSLTDKIQLACLPPAGTILPNNYPCYVTGWGRLQTNGAVPDVLQQGRLLVVDYATCSSSAWWGSSVKTSMICAGGDGVISSCNGDSGGPLNCQASDGRWQVHGIVSFGSRLGCNYYHKPSVFTRVSNYIDWINSVIANN

SEQ ID NO: 132 - DNA, 3696 bp, Homo sapiens
  Enteropeptidase
accagacagttcttaaattagcaagccttcaaaaccaaaaatggggtcgaaaagaggcatatcttctaggcatcattctctcagctcctatgaaatcatgtttgcagctctctttgccatattggtagtgctctgtgctggattaattgcagtatcctgcctgacaatcaaggaatcccaacgaggtgcagcacttggacagagtcatgaagccagagcgacatttaaaataacatccggagttacatataatcctaatttgcaagacaaactctcagtggatttcaaagttcttgcttttgaccttcagcaaatgatagatgagatctttctatcaagcaatctgaagaatgaatataagaactcaagagttttacaatttgaaaatggcagcattatagtcgtatttgaccttttctttgcccagtgggtgtcagatcaaaatgtaaaagaagaactgattcaaggccttgaagcaaataaatccagccaactggtcactttccatattgatttgaacagcgttgatatcctagacaagctaacaaccaccagtcatctggcaactccaggaaatgtctcaatagagtgcctgcctggttcaagtccttgtactgatgctctaacgtgtataaaagctgatttattttgtgatggagaagtaaactgtccagatggttctgacgaagacaataaaatgtgtgccacagtttgtgatggaagatttttgttaactggatcatctgggtctttccaggctactcattatccaaaaccttctgaaacaagtgttgtctgccagtggatcatacgtgtaaaccaaggactttccattaaactgagcttcgatgattttaatacatattatacagatatattagatatttatgaaggtgtaggatcaagcaagattttaagagcttctatttgggaaactaatcctggcacaataagaattttttccaaccaagttactgccacctttcttatagaatctgatgaaagtgattatgttggctttaatgcaacatatactgcatttaacagcagtgagcttaataattatgagaaaattaattgtaactttgaggatggcttttgtttctgggtccaggatctaaatgatgataatgaatgggaaaggattcagggaagcaccttttctccttttactggacccaattttgaccacacttttggcaatgcttcaggattttacatttctaccccaactggaccaggagggagacaagaacgagtggggcttttaagcctccctttggaccccactttggagccagcttgccttagtttctggtatcatatgtatggtgaaaatgtccataaattaagcattaatatcagcaatgaccaaaatatggagaagacagttttccaaaaggaaggaaattatggagacaattggaattatggacaagtaaccctaaatgaaacagttaaatttaaggttgcttttaatgcttttaaaaacaagatcctgagtgatattgcgttggatgacattagcctaacatatgggatttgcaatgggagtctttatccagaaccaactttggtgccaactcctccaccagaacttcctacggactgtggaggaccttttgagctgtgggagccaaatacaacattcagttctacgaactttccaaacagctaccctaatctggctttctgtgtttggattttaaatgcacaaaaaggaaagaatatacaacttcattttcaagaatttgacttagaaaatattaacgatgtagttgaaataagagatggtgaagaagctgattccttgctcttagctgtgtacacagggcctggcccagtaaaggatgtgttctctaccaccaacagaatgactgtgcttctcatcactaacgatgtgttggcaagaggagggtttaaagcaaactttactactggctatcacttggggattccagagccatgcaaggcagaccattttcaatgtaaaaatggagagtgtgttccactggtgaatctctgtgacggtcatctgcactgtgaggatggctcagatgaagcagattgtgtgcgttttttcaatggcacaacgaacaacaatggtttagtgcggttcagaatccagagcatatggcatacagcttgtgctgagaactggaccacccagatttcaaatgatgtttgtcaactgctgggactagggagtggaaactcatcaaagccaatcttctctaccgatggtggaccatttgtcaaattaaacacagcacctgatggccacttaatactaacacccagtcaacagtgtttacaggattccttgattcggttacagtgtaaccataaatcttgtggaaaaaaactggcagctcaagacatcaccccaaagattgttggaggaagtaatgccaaagaaggggcctggccctgggttgtgggtctgtattatggcggccgactgctctgcggcgcatctctcgtcagcagtgactggctggtgtccgccgcacactgcgtgtatgggagaaacttagagccatccaagtggacagcaatcctaggcctgcatatgaaatcaaatctgacctctcctcaaacagtccctcgattaatagatgaaattgtcataaaccctcattacaataggcgaagaaaggacaacgacattgccatgatgcatctggaatttaaagtgaattacacagattacatacaacctatttgtttaccggaagaaaatcaagtttttcctccaggaagaaattgttctattgctggttgggggacggttgtatatcaaggtactactgcaaacatattgcaagaagctgatgttcctcttctatcaaatgagagatgccaacagcagatgccagaatataacattactgaaaatatgatatgtgcaggctatgaagaaggaggaatagattcttgtcagggggattcaggaggaccattaatgtgccaagaaaacaacaggtggttccttgctggtgtgacctcatttggatacaagtgtgccctgcctaatcgccccggagtgtatgccagggtctcaaggtttaccgaatggatacaaagttttctacattagcgcatttcttaaactaaacaggaaagtcgcattattttcccattctactctagaaagcatggaaattaagtgtttcgtacaaaaattttaaaaagttaccaaaggtttttattcttacctatgtcaatgaaatgctagggggccagggaaacaaaattttaaaaataataaaattcaccatagcaatacagaataactttaaaataccattaaatacatttgtatttcattgtgaacaggtatttcttcacagatctcatttttaaaattcttaatgattatttttattacttactgttgtttaaagggatgttattttaaagcatataccatacacttaagaaatttgagcagaatttaaaaaagaaagaaaataaattgtttttcccaaagtatgtcactgttggaaataaactgccataaattttctagttccagtttagtttgctgctattagcagaaactcaattgtttctctgtcttttctatcaaaattttcaacatatgcataaccttagtattttcccaaccaatagaaactatttattgtaagcttatgtcacaggcctggactaaattgattttacgttcctctt

SEQ ID NO: 133 - protein, 1019 aa, Homo sapiens
  Enteropeptidase
MGSKRGISSRHHSLSSYEIMFAALFAILVVLCAGLIAVSCLTIKESQRGAALGQSHEARATFKITSGVTYNPNLQDKLSVDFKVLAFDLQQMIDEIFLSSNLKNEYKNSRVLQFENGSIIVVFDLFFAQWVSDQNVKEELIQGLEANKSSQLVTFHIDLNSVDILDKLTTTSHLATPGNVSIECLPGSSPCTDALTCIKADLFCDGEVNCPDGSDEDNKMCATVCDGRFLLTGSSGSFQATHYPKPSETSVVCQWIIRVNQGLSIKLSFDDFNTYYTDILDIYEGVGSSKILRASIWETNPGTIRIFSNQVTATFLIESDESDYVGFNATYTAFNSSELNNYEKINCNFEDGFCFWVQDLNDDNEWERIQGSTFSPFTGPNFDHTFGNASGFYISTPTGPGGRQERVGLLSLPLDPTLEPACLSFWYHMYGENVHKLSINISNDQNMEKTVFQKEGNYGDNWNYGQVTLNETVKFKVAFNAFKNKILSDIALDDISLTYGICNGSLYPEPTLVPTPPPELPTDCGGPFELWEPNTTFSSTNFPNSYPNLAFCVWILNAQKGKNIQLHFQEFDLENINDVVEIRDGEEADSLLLAVYTGPGPVKDVFSTTNRMTVLLITNDVLARGGFKANFTTGYHLGIPEPCKADHFQCKNGECVPLVNLCDGHLHCEDGSDEADCVRFFNGTTNNNGLVRFRIQSIWHTACAENWTTQISNDVCQLLGLGSGNSSKPIFSTDGGPFVKLNTAPDGHLILTPSQQCLQDSLIRLQCNHKSCGKKLAAQDITPKIVGGSNAKEGAWPWVVGLYYGGRLLCGASLVSSDWLVSAAHCVYGRNLEPSKWTAILGLHMKSNLTSPQTVPRLIDEIVINPHYNRRRKDNDIAMMHLEFKVNYTDYIQPICLPEENQVFPPGRNCSIAGWGTVVYQGTTANILQEADVPLLSNERCQQQMPEYNITENMICAGYEEGGIDSCQGDSGGPLMCQENNRWFLAGVTSFGYKCALPNRPGVYARVSRFTEWIQSFLH

SEQ ID NO: 134 - DNA, 917 bp, Homo sapiens
  chymotrypsin C
cagccagtcctgagcacctaaccatgttgggcatcactgtcctcgctgcgctcttggcctgtgcctccagctgtggggtgcccagcttcccgcccaacctatccgcccgagtggtgggaggagaggatgcccggccccacagctggccctggcagatctccctccagtacctcaagaacgacacgtggaggcatacgtgtggcgggactttgattgctagcaacttcgtcctcactgccgcccactgcatcagcaacacccggacctaccgtgtggccgtgggaaagaacaacctggaggtggaagacgaagaaggatccctgtttgtgggtgtggacaccatccacgtccacaagagatggaatgccctcctgttgcgcaatgatattgccctcatcaagcttgcagagcatgtggagctgagtgacaccatccaggtggcctgcctgccagagaaggactccctgctccccaaggactacccctgctatgtcaccggctggggccgcctctggaccaacggccccattgctgataagctgcagcagggcctgcagcccgtggtggatcacgccacgtgctccaggattgactggtggggcttcagggtgaagaaaaccatggtgtgcgctgggggcgatggcgtcatctcagcctgcaatggggactccggtggcccactgaactgccagttggagaacggttcctgggaggtgtttggcatcgtcagctttggctcccggcggggctgcaacacccgcaagaagccggtagtctacacccgggtgtccgcctacatcgactggatcaacgagaaaatgcagctgtgatttgttgctgggagcggcggcagcgagtccctgcaacagcaataaacttccttctcctcgggccacctgaaaaaaaaaaaaaaaaaa

SEQ ID NO: 135 - protein, 268 aa, Homo sapiens [sequence omitted]

SEQ ID NO: 136 - DNA, 1938 bp, Homo sapoens
  Prostasin
gactttggtggcaagaggagctggcggagcccagccagtgggcggggccaggggaggggcgggcaggtaggtgcagccactcctgggaggaccctgcgtggccagacggtgctggtgactcgtccacactgctcgcttcggatactccaggcgtctcccgttgcggccgctccctgccttagaggccagccttggacacttgctgcccctttccagcccggattctgggatccttccctctgagccaacatctgggtcctgccttcgacaccaccccaaggcttcctaccttgcgtgcctggagtctgccccaggggcccttgtcctgggccatggcccagaagggggtcctggggcctgggcagctgggggctgtggccattctgctctatcttggattactccggtcggggacaggagcggaaggggcagaagctccctgcggtgtggccccccaagcacgcatcacaggtggcagcagtgcagtcgccggtcagtggccctggcaggtcagcatcacctatgaaggcgtccatgtgtgtggtggctctctcgtgtctgagcagtgggtgctgtcagctgctcactgcttccccagcgagcaccacaaggaagcctatgaggtcaagctgggggcccaccagctagactcctactccgaggacgccaaggtcagcaccctgaaggacatcatcccccaccccagctacctccaggagggctcccagggcgacattgcactcctccaactcagcagacccatcaccttctcccgctacatccggcccatctgcctccctgcagccaacgcctccttccccaacggcctccactgcactgtcactggctggggtcatgtggccccctcagtgagcctcctgacgcccaagccactgcagcaactcgaggtgcctctgatcagtcgtgagacgtgtaactgcctgtacaacatcgacgccaagcctgaggagccgcactttgtccaagaggacatggtgtgtgctggctatgtggaggggggcaaggacgcctgccagggtgactctgggggcccactctcctgccctgtggagggtctctggtacctgacgggcattgtgagctggggagatgcctgtggggcccgcaacaggcctggtgtgtacactctggcctccagctatgcctcctggatccaaagcaaggtgacagaactccagcctcgtgtggtgccccaaacccaggagtcccagcccgacagcaacctctgtggcagccacctggccttcagctctgccccagcccagggcttgctgaggcccatccttttcctgcctctgggcctggctctgggcctcctctccccatggctcagcgagcactgagctggccctacttccaggatggatgcatcacactcaaggacaggagcctggtccttccctgatggcctttggacccagggcctgacttgagccactccttccttcaggactctgcgggaggctggggccccatcttgatctttgagcccattcttctgggtgtgctttttgggaccatcactgagagtcaggagttttactgcctgtagcaatggccagagcctctggcccctcacccaccatggaccagcccattggccgagctcctggggagctcctgggacccttggctatgaaaatgagccctggctcccacctgtttctggaagactgctcccggcccgcctgcccagactgatgagcacatctctctgccctctccctgtgttctgggctggggccacctttgtgcagcttcgaggacaggaaaggccccaatcttgcccactggccgctgagcgcccccgagccctgactcctggactccggaggactgagcccccaccggaactgggctggcgcttggatctggggtgggagtaacagggcagaaatgattaaaatgtttgagcac

SEQ ID NO: 137 - protein, 343 aa, Homo sapiens
  Prostasin
MAQKGVLGPGQLGAVAILLYLGLLRSGTGAEGAEAPCGVAPQARITGGSSAVAGQWPWQVSITYEGVHVCGGSLVSEQWVLSAAHCFPSEHHKEAYEVKLGAHQLDSYSEDAKVSTLKDIIPHPSYLQEGSQGDIALLQLSRPITFSRYIRPICLPAANASFPNGLHCTVTGWGHVAPSVSLLTPKPLQQLEVPLISRETCNCLYNIDAKPEEPHFVQEDMVCAGYVEGGKDACQGDSGGPLSCPVEGLWYLTGIVSWGDACGARNRPGVYTLASSYASWIQSKVTELQPRVVPQTQESQPDSNLCGSHLAFSSAPAQGLLRPILFLPLGLALGLLSPWLSEH

SEQ ID NO: 138 - DNA, 874 bp, Homo sapiens
  kallikrein 1
agttcctccacctgctggcccctggacacctctgtcaccatgtggttcctggttctgtgcctcgccctgtccctgggggggactggtgctgcgcccccgattcagtcccggattgtgggaggctgggagtgtgagcagcattcccagccctggcaggcggctctgtaccatttcagcactttccagtgtgggggcatcctggtgcaccgccagtgggtgctcacagctgctcattgcatcagcgacaattaccagctctggctgggtcgccacaacttgtttgacgacgaaaacacagcccagtttgttcatgtcagtgagagcttcccacaccctggcttcaacatgagcctcctggagaaccacacccgccaagcagacgaggactacagccacgacctcatgctgctccgcctgacagagcctgctgataccatcacagatgctgtgaaggtcgtggagttgcccaccgaggaacccgaagtggggagcacctgtttggcttccggctggggcagcatcgaaccagagaatttctcatttccagatgatctccagtgtgtggacctcaaaatcctgcctaatgatgagtgcaaaaaagcccacgtccagaaggtgacagacttcatgctgtgtgtcggacacctggaaggtggcaaagacacctgtgtgggtgattcagggggcccgctgatgtgtgatggtgtgctccaaggtgtcacatcatggggctacgtcccttgtggcacccccaataagccttctgtcgccgtcagagtgctgtcttatgtgaagtggatcgaggacaccatagcggagaactcctgaacgcccagccctgtcccctacccccagtaaaatcaaatgtgcatcc

SEQ ID NO: 139 - protein, 262 aa, Homo sapiens
  kallikrein 1
MWFLVLCLALSLGGTGAAPPIQSRIVGGWECEQHSQPWQAALYHFSTFQCGGILVHRQWVLTAAHCISDNYQLWLGRHNLFDDENTAQFVHVSESFPHPGFNMSLLENHTRQADEDYSHDLMLLRLTEPADTITDAVKVVELPTEEPEVGSTCLASGWGSIEPENFSFPDDLQCVDLKILPNDECKKAHVQKVTDFMLCVGHLEGGKDTCVGDSGGPLMCDGVLQGVTSWGYVPCGTPNKPSVAVRVLSYVKWIEDTIAENS

SEQ ID NO: 140 - DNA, 2855 bp, Homo sapiens
  kallikrein hK2 transcript variant 1
agccccaaactcaccacctggccgtggacacctgtgtcagcatgtgggacctggttctctccatcgccttgtctgtggggtgcactggtgccgtgcccctcatccagtctcggattgtgggaggctgggagtgtgagaagcattcccaaccctggcaggtggctgtgtacagtcatggatgggcacactgtgggggtgtcctggtgcacccccagtgggtgctcacagctgcccattgcctaaagaagaatagccaggtctggctgggtcggcacaacctgtttgagcctgaagacacaggccagagggtccctgtcagccacagcttcccacacccgctctacaatatgagccttctgaagcatcaaagccttagaccagatgaagactccagccatgacctcatgctgctccgcctgtcagagcctgccaagatcacagatgttgtgaaggtcctgggcctgcccacccaggagccagcactggggaccacctgctacgcctcaggctggggcagcatcgaaccagaggagttcttgcgccccaggagtcttcagtgtgtgagcctccatctcctgtccaatgacatgtgtgctagagcttactctgagaaggtgacagagttcatgttgtgtgctgggctctggacaggtggtaaagacacttgtgggggtgattctgggggtccacttgtctgtaatggtgtgcttcaaggtatcacatcatggggccctgagccatgtgccctgcctgaaaagcctgctgtgtacaccaaggtggtgcattaccggaagtggatcaaggacaccatcgcagccaacccctgagtgcccctgtcccacccctacctctagtaaatttaagtccacctcacgttctggcatcacttggcctttctggatgctggacacctgaagcttggaactcacctggccgaagctcgagcctcctgagtcctactgacctgtgctttctggtgtggagtccagggctgctaggaaaaggaatgggcagacacaggtgtatgccaatgtttctgaaatgggtataatttcgtcctctccttcggaacactggctgtctctgaagacttctcgctcagtttcagtgaggacacacacaaagacgtgggtgaccatgttgtttgtggggtgcagagatgggaggggtggggcccaccctggaagagtggacagtgacacaaggtggacactctctacagatcactgaggataagctggagccacaatgcatgaggcacacacacagcaaggatgacgctgtaaacatagcccacgctgtcctgggggcactgggaagcctagataaggccgtgagcagaaagaaggggaggatcctcctatgttgttgaaggagggactagggggagaaactgaaagctgattaattacaggaggtttgttcaggtcccccaaaccaccgtcagatttgatgatttcctagcaggacttacagaaataaagagctatcatgctgtggtttattatggtttgttacattgatgggatacatactgaaatcagcaaacaaaacagatgtatagattagagtgtggagaaaacagaggaaaacttgcagttacgaagactggcaacttggctttactaagttttcagactggcaggaagtcaaacctattaggctgaggaccttgtggagtgtagctgatccagctgatagaggaactagccaggtgggggcctttccctttggatggggggcatatctgacagttattctctccaagtggagacttacggacagcatataattctccctgcaaggatgtatgataatatgtacaaagtaattccaactgaggaagctcacctgatccttagtgtccaaggtttttactgggggtctgtaggacgagtatggagtacttgaataattgacctgaagtcctcagacctgaggttccctagagttcaaacagatacagcatggtccagagtcccagatgtacaaaaacagggattcatcacaaatcccatctttagcatgaagggtctggcatggcccaaggccccaagtatatcaaggcacttgggcagaacatgccaaggaatcaaatgtcatctcccaggagttattcaagggtgagccctttacttgggatgtacaggctttgagcagtgcagggctgctgagtcaaccttttattgtacaggggatgagggaaagggagaggatgaggaagcccccctggggatttggtttggtcttgtgatcaggtggtctatggggctatccctacaaagaagaatccagaaataggggcacattgaggaatgatactgagcccaaagagcattcaatcattgttttatttgccttcttttcacaccattggtgagggagggattaccaccctggggttatgaagatggttgaacaccccacacatagcaccggagatatgagatcaacagtttcttagccatagagattcacagcccagagcaggaggacgctgcacaccatgcaggatgacatgggggatgcgctcgggattggtgtgaagaagcaaggactgttagaggcaggctttatagtaacaagacggtggggcaaactctgatttccgtgggggaatgtcatggtcttgctttactaagttttgagactggcaggtagtgaaactcattaggctgagaaccttgtggaatgcagctgacccagctgatagaggaagtagccaggtgggagcctttcccagtgggtgtgggacatatctggcaagattttgtggcactcctggttacagatactggggcagcaaataaaactgaatcttgttttcagaccttaaaaaaaaaaaaaaaaaaaaa

SEQ ID NO: 141 - protein, 261 aa, Homo sapiens
  kallikrein hK2 isoform 1
MWDLVLSIALSVGCTGAVPLIQSRIVGGWECEKHSQPWQVAVYSHGWAHCGGVLVHPQWVLTAAHCLKKNSQVWLGRHNLFEPEDTGQRVPVSHSFPHPLYNMSLLKHQSLRPDEDSSHDLMLLRLSEPAKITDVVKVLGLPTQEPALGTTCYASGWGSIEPEEFLRPRSLQCVSLHLLSNDMCARAYSEKVTEFMLCAGLWTGGKDTCGGDSGGPLVCNGVLQGITSWGPEPCALPEKPAVYTKVVHYRKWIKDTIAANP

SEQ ID NO: 142 - DNA, 2892 bp, Homo sapiens
  kallikrein hK2 transcript variant 2
agccccaaactcaccacctggccgtggacacctgtgtcagcatgtgggacctggttctctccatcgccttgtctgtggggtgcactggtgccgtgcccctcatccagtctcggattgtgggaggctgggagtgtgagaagcattcccaaccctggcaggtggctgtgtacagtcatggatgggcacactgtgggggtgtcctggtgcacccccagtgggtgctcacagctgcccattgcctaaagaagaatagccaggtctggctgggtcggcacaacctgtttgagcctgaagacacaggccagagggtccctgtcagccacagcttcccacacccgctctacaatatgagccttctgaagcatcaaagccttagaccagatgaagactccagccatgacctcatgctgctccgcctgtcagagcctgccaagatcacagatgttgtgaaggtcctgggcctgcccacccaggagccagcactggggaccacctgctacgcctcaggctggggcagcatcgaaccagaggagttcttgcgccccaggagtcttcagtgtgtgagcctccatctcctgtccaatgacatgtgtgctagagcttactctgagaaggtgacagagttcatgttgtgtgctgggctctggacaggtggtaaagacacttgtggggtgagtcatccctactcccaacatctggaggggaaagggtgattctgggggtccacttgtctgtaatggtgtgcttcaaggtatcacatcatggggccctgagccatgtgccctgcctgaaaagcctgctgtgtacaccaaggtggtgcattaccggaagtggatcaaggacaccatcgcagccaacccctgagtgcccctgtcccacccctacctctagtaaatttaagtccacctcacgttctggcatcacttggcctttctggatgctggacacctgaagcttggaactcacctggccgaagctcgagcctcctgagtcctactgacctgtgctttctggtgtggagtccagggctgctaggaaaaggaatgggcagacacaggtgtatgccaatgtttctgaaatgggtataatttcgtcctctccttcggaacactggctgtctctgaagacttctcgctcagtttcagtgaggacacacacaaagacgtgggtgaccatgttgtttgtggggtgcagagatgggaggggtggggcccaccctggaagagtggacagtgacacaaggtggacactctctacagatcactgaggataagctggagccacaatgcatgaggcacacacacagcaaggatgacgctgtaaacatagcccacgctgtcctgggggcactgggaagcctagataaggccgtgagcagaaagaaggggaggatcctcctatgttgttgaaggagggactagggggagaaactgaaagctgattaattacaggaggtttgttcaggtcccccaaaccaccgtcagatttgatgatttcctagcaggacttacagaaataaagagctatcatgctgtggtttattatggtttgttacattgatgggatacatactgaaatcagcaaacaaaacagatgtatagattagagtgtggagaaaacagaggaaaacttgcagttacgaagactggcaacttggctttactaagttttcagactggcaggaagtcaaacctattaggctgaggaccttgtggagtgtagctgatccagctgatagaggaactagccaggtgggggcctttccctttggatggggggcatatctgacagttattctctccaagtggagacttacggacagcatataattctccctgcaaggatgtatgataatatgtacaaagtaattccaactgaggaagctcacctgatccttagtgtccaaggtttttactgggggtctgtaggacgagtatggagtacttgaataattgacctgaagtcctcagacctgaggttccctagagttcaaacagatacagcatggtccagagtcccagatgtacaaaaacagggattcatcacaaatcccatctttagcatgaagggtctggcatggcccaaggccccaagtatatcaaggcacttgggcagaacatgccaaggaatcaaatgtcatctcccaggagttattcaagggtgagccctttacttgggatgtacaggctttgagcagtgcagggctgctgagtcaaccttttattgtacaggggatgagggaaagggagaggatgaggaagcccccctggggatttggtttggtcttgtgatcaggtggtctatggggctatccctacaaagaagaatccagaaataggggcacattgaggaatgatactgagcccaaagagcattcaatcattgttttatttgccttcttttcacaccattggtgagggagggattaccaccctggggttatgaagatggttgaacaccccacacatagcaccggagatatgagatcaacagtttcttagccatagagattcacagcccagagcaggaggacgctgcacaccatgcaggatgacatgggggatgcgctcgggattggtgtgaagaagcaaggactgttagaggcaggctttatagtaacaagacggtggggcaaactctgatttccgtgggggaatgtcatggtcttgctttactaagttttgagactggcaggtagtgaaactcattaggctgagaaccttgtggaatgcagctgacccagctgatagaggaagtagccaggtgggagcctttcccagtgggtgtgggacatatctggcaagattttgtggcactcctggttacagatactggggcagcaaataaaactgaatcttgttttcagaccttaaaaaaaaaaaaaaaaaaaaa

SEQ ID NO: 143 - protein, 223 aa, Homo sapiens
  kallikrein hK2 isoform 2
MWDLVLSIALSVGCTGAVPLIQSRIVGGWECEKHSQPWQVAVYSHGWAHCGGVLVHPQWVLTAAHCLKKNSQVWLGRHNLFEPEDTGQRVPVSHSFPHPLYNMSLLKHQSLRPDEDSSHDLMLLRLSEPAKITDVVKVLGLPTQEPALGTTCYASGWGSIEPEEFLRPRSLQCVSLHLLSNDMCARAYSEKVTEFMLCAGLWTGGKDTCGVSHPYSQHLEGKG

SEQ ID NO: 144 - DNA, 2879 bp, Homo sapiens
  kallikrein hK2 transcript variant 3
agccccaaactcaccacctggccgtggacacctgtgtcagcatgtgggacctggttctctccatcgccttgtctgtggggtgcactggtgccgtgcccctcatccagtctcggattgtgggaggctgggagtgtgagaagcattcccaaccctggcaggtggctgtgtacagtcatggatgggcacactgtgggggtgtcctggtgcacccccagtgggtgctcacagctgcccattgcctaaagaagaatagccaggtctggctgggtcggcacaacctgtttgagcctgaagacacaggccagagggtccctgtcagccacagcttcccacacccgctctacaatatgagccttctgaagcatcaaagccttagaccagatgaagactccagccatgacctcatgctgctccgcctgtcagagcctgccaagatcacagatgttgtgaaggtcctgggcctgcccacccaggagccagcactggggaccacctgctacgcctcaggctggggcagcatcgaaccagaggagtgagtcttcagtgtgtgagcctccatctcctgtccaatgacatgtgtgctagagcttactctgagaaggtgacagagttcatgttgtgtgctgggctctggacaggtggtaaagacacttgtggggtgagtcatccctactcccaacatctggaggggaaagggtgattctgggggtccacttgtctgtaatggtgtgcttcaaggtatcacatcatggggccctgagccatgtgccctgcctgaaaagcctgctgtgtacaccaaggtggtgcattaccggaagtggatcaaggacaccatcgcagccaacccctgagtgcccctgtcccacccctacctctagtaaatttaagtccacctcacgttctggcatcacttggcctttctggatgctggacacctgaagcttggaactcacctggccgaagctcgagcctcctgagtcctactgacctgtgctttctggtgtggagtccagggctgctaggaaaaggaatgggcagacacaggtgtatgccaatgtttctgaaatgggtataatttcgtcctctccttcggaacactggctgtctctgaagacttctcgctcagtttcagtgaggacacacacaaagacgtgggtgaccatgttgtttgtggggtgcagagatgggaggggtggggcccaccctggaagagtggacagtgacacaaggtggacactctctacagatcactgaggataagctggagccacaatgcatgaggcacacacacagcaaggatgacgctgtaaacatagcccacgctgtcctgggggcactgggaagcctagataaggccgtgagcagaaagaaggggaggatcctcctatgttgttgaaggagggactagggggagaaactgaaagctgattaattacaggaggtttgttcaggtcccccaaaccaccgtcagatttgatgatttcctagcaggacttacagaaataaagagctatcatgctgtggtttattatggtttgttacattgatgggatacatactgaaatcagcaaacaaaacagatgtatagattagagtgtggagaaaacagaggaaaacttgcagttacgaagactggcaacttggctttactaagttttcagactggcaggaagtcaaacctattaggctgaggaccttgtggagtgtagctgatccagctgatagaggaactagccaggtgggggcctttccctttggatggggggcatatctgacagttattctctccaagtggagacttacggacagcatataattctccctgcaaggatgtatgataatatgtacaaagtaattccaactgaggaagctcacctgatccttagtgtccaaggtttttactgggggtctgtaggacgagtatggagtacttgaataattgacctgaagtcctcagacctgaggttccctagagttcaaacagatacagcatggtccagagtcccagatgtacaaaaacagggattcatcacaaatcccatctttagcatgaagggtctggcatggcccaaggccccaagtatatcaaggcacttgggcagaacatgccaaggaatcaaatgtcatctcccaggagttattcaagggtgagccctttacttgggatgtacaggctttgagcagtgcagggctgctgagtcaaccttttattgtacaggggatgagggaaagggagaggatgaggaagcccccctggggatttggtttggtcttgtgatcaggtggtctatggggctatccctacaaagaagaatccagaaataggggcacattgaggaatgatactgagcccaaagagcattcaatcattgttttatttgccttcttttcacaccattggtgagggagggattaccaccctggggttatgaagatggttgaacaccccacacatagcaccggagatatgagatcaacagtttcttagccatagagattcacagcccagagcaggaggacgctgcacaccatgcaggatgacatgggggatgcgctcgggattggtgtgaagaagcaaggactgttagaggcaggctttatagtaacaagacggtggggcaaactctgatttccgtgggggaatgtcatggtcttgctttactaagttttgagactggcaggtagtgaaactcattaggctgagaaccttgtggaatgcagctgacccagctgatagaggaagtagccaggtgggagcctttcccagtgggtgtgggacatatctggcaagattttgtggcactcctggttacagatactggggcagcaaataaaactgaatcttgttttcagaccttaaaaaaaaaaaaaaaaaaaaa

SEQ ID NO: 145 - protein, 164 aa, Homo sapiens
  kallikrein hK2 isoform 3
MWDLVLSIALSVGCTGAVPLIQSRIVGGWECEKHSQPWQVAVYSHGWAHCGGVLVHPQWVLTAAHCLKKNSQVWLGRHNLFEPEDTGQRVPVSHSFPHPLYNMSLLKHQSLRPDEDSSHDLMLLRLSEPAKITDVVKVLGLPTQEPALGTTCYASGWGSIEPEE

SEQ ID NO: 146 - DNA, 1464 bp, Homo sapiens
  kallikrein 3 transcript variant 1
agccccaagcttaccacctgcacccggagagctgtgtcaccatgtgggtcccggttgtcttcctcaccctgtccgtgacgtggattggtgctgcacccctcatcctgtctcggattgtgggaggctgggagtgcgagaagcattcccaaccctggcaggtgcttgtggcctctcgtggcagggcagtctgcggcggtgttctggtgcacccccagtgggtcctcacagctgcccactgcatcaggaacaaaagcgtgatcttgctgggtcggcacagcctgtttcatcctgaagacacaggccaggtatttcaggtcagccacagcttcccacacccgctctacgatatgagcctcctgaagaatcgattcctcaggccaggtgatgactccagccacgacctcatgctgctccgcctgtcagagcctgccgagctcacggatgctgtgaaggtcatggacctgcccacccaggagccagcactggggaccacctgctacgcctcaggctggggcagcattgaaccagaggagttcttgaccccaaagaaacttcagtgtgtggacctccatgttatttccaatgacgtgtgtgcgcaagttcaccctcagaaggtgaccaagttcatgctgtgtgctggacgctggacagggggcaaaagcacctgctcgggtgattctgggggcccacttgtctgtaatggtgtgcttcaaggtatcacgtcatggggcagtgaaccatgtgccctgcccgaaaggccttccctgtacaccaaggtggtgcattaccggaagtggatcaaggacaccatcgtggccaacccctgagcacccctatcaaccccctattgtagtaaacttggaaccttggaaatgaccaggccaagactcaagcctccccagttctactgacctttgtccttaggtgtgaggtccagggttgctaggaaaagaaatcagcagacacaggtgtagaccagagtgtttcttaaatggtgtaattttgtcctctctgtgtcctggggaatactggccatgcctggagacatatcactcaatttctctgaggacacagataggatggggtgtctgtgttatttgtggggtacagagatgaaagaggggtgggatccacactgagagagtggagagtgacatgtgctggacactgtccatgaagcactgagcagaagctggaggcacaacgcaccagacactcacagcaaggatggagctgaaaacataacccactctgtcctggaggcactgggaagcctagagaaggctgtgagccaaggagggagggtcttcctttggcatgggatggggatgaagtaaggagagggactggaccccctggaagctgattcactatggggggaggtgtattgaagtcctccagacaaccctcagatttgatgatttcctagtagaactcacagaaataaagagctgttatactgtg

SEQ ID NO: 147 - protein, 261 aa, Homo sapiens
  kallikrein 3 isoform 1
MWVPVVFLTLSVTWIGAAPLILSRIVGGWECEKHSQPWQVLVASRGRAVCGGVLVHPQWVLTAAHCIRNKSVILLGRHSLFHPEDTGQVFQVSHSFPHPLYDMSLLKNRFLRPGDDSSHDLMLLRLSEPAELTDAVKVMDLPTQEPALGTTCYASGWGSIEPEEFLTPKKLQCVDLHVISNDVCAQVHPQKVTKFMLCAGRWTGGKSTCSGDSGGPLVCNGVLQGITSWGSEPCALPERPSLYTKVVHYRKWIKDTIVANP

SEQ ID NO: 148 - DNA, 1906 bp, Homo sapiens
  kallikrein 3 transcript variant 3
agccccaagcttaccacctgcacccggagagctgtgtcaccatgtgggtcccggttgtcttcctcaccctgtccgtgacgtggattggtgctgcacccctcatcctgtctcggattgtgggaggctgggagtgcgagaagcattcccaaccctggcaggtgcttgtggcctctcgtggcagggcagtctgcggcggtgttctggtgcacccccagtgggtcctcacagctgcccactgcatcaggaacaaaagcgtgatcttgctgggtcggcacagcctgtttcatcctgaagacacaggccaggtatttcaggtcagccacagcttcccacacccgctctacgatatgagcctcctgaagaatcgattcctcaggccaggtgatgactccagccacgacctcatgctgctccgcctgtcagagcctgccgagctcacggatgctgtgaaggtcatggacctgcccacccaggagccagcactggggaccacctgctacgcctcaggctggggcagcattgaaccagaggagttcttgaccccaaagaaacttcagtgtgtggacctccatgttatttccaatgacgtgtgtgcgcaagttcaccctcagaaggtgaccaagttcatgctgtgtgctggacgctggacagggggcaaaagcacctgctcgtgggtcattctgatcaccgaactgaccatgccagccctgccgatggtcctccatggctccctagtgccctggagaggaggtgtctagtcagagagtagtcctggaaggtggcctctgtgaggagccacggggacagcatcctgcagatggtcctggcccttgtcccaccgacctgtctacaaggactgtcctcgtggaccctcccctctgcacaggagctggaccctgaagtcccttccccaccggccaggactggagcccctacccctctgttggaatccctgcccaccttcttctggaagtcggctctggagacatttctctcttcttccaaagctgggaactgctatctgttatctgcctgtccaggtctgaaagataggattgcccaggcagaaactgggactgacctatctcactctctccctgcttttacccttagggtgattctgggggcccacttgtctgtaatggtgtgcttcaaggtatcacgtcatggggcagtgaaccatgtgccctgcccgaaaggccttccctgtacaccaaggtggtgcattaccggaagtggatcaaggacaccatcgtggccaacccctgagcacccctatcaaccccctattgtagtaaacttggaaccttggaaatgaccaggccaagactcaagcctccccagttctactgacctttgtccttaggtgtgaggtccagggttgctaggaaaagaaatcagcagacacaggtgtagaccagagtgtttcttaaatggtgtaattttgtcctctctgtgtcctggggaatactggccatgcctggagacatatcactcaatttctctgaggacacagataggatggggtgtctgtgttatttgtggggtacagagatgaaagaggggtgggatccacactgagagagtggagagtgacatgtgctggacactgtccatgaagcactgagcagaagctggaggcacaacgcaccagacactcacagcaaggatggagctgaaaacataacccactctgtcctggaggcactgggaagcctagagaaggctgtgagccaaggagggagggtcttcctttggcatgggatggggatgaagtaaggagagggactggaccccctggaagctgattcactatggggggaggtgtattgaagtcctccagacaaccctcagatttgatgatttcctagtagaactcacagaaataaagagctgttatactgtg

SEQ ID NO: 149 - protein, 238 aa, Homo sapiens
  kallikrein 3 isoform 3
MWVPVVFLTLSVTWIGAAPLILSRIVGGWECEKHSQPWQVLVASRGRAVCGGVLVHPQWVLTAAHCIRNKSVILLGRHSLFHPEDTGQVFQVSHSFPHPLYDMSLLKNRFLRPGDDSSHDLMLLRLSEPAELTDAVKVMDLPTQEPALGTTCYASGWGSIEPEEFLTPKKLQCVDLHVISNDVCAQVHPQKVTKFMLCAGRWTGGKSTCSWVILITELTMPALPMVLHGSLVPWRGGV

SEQ ID NO: 150 - DNA, 1335 bp, Homo sapiens
  kallikrein 3 transcript variant 4
agccccaagcttaccacctgcacccggagagctgtgtcaccatgtgggtcccggttgtcttcctcaccctgtccgtgacgtggattggtgctgcacccctcatcctgtctcggattgtgggaggctgggagtgcgagaagcattcccaaccctggcaggtgcttgtggcctctcgtggcagggcagtctgcggcggtgttctggtgcacccccagtgggtcctcacagctgcccactgcatcaggaagccaggtgatgactccagccacgacctcatgctgctccgcctgtcagagcctgccgagctcacggatgctgtgaaggtcatggacctgcccacccaggagccagcactggggaccacctgctacgcctcaggctggggcagcattgaaccagaggagttcttgaccccaaagaaacttcagtgtgtggacctccatgttatttccaatgacgtgtgtgcgcaagttcaccctcagaaggtgaccaagttcatgctgtgtgctggacgctggacagggggcaaaagcacctgctcgggtgattctgggggcccacttgtctgtaatggtgtgcttcaaggtatcacgtcatggggcagtgaaccatgtgccctgcccgaaaggccttccctgtacaccaaggtggtgcattaccggaagtggatcaaggacaccatcgtggccaacccctgagcacccctatcaaccccctattgtagtaaacttggaaccttggaaatgaccaggccaagactcaagcctccccagttctactgacctttgtccttaggtgtgaggtccagggttgctaggaaaagaaatcagcagacacaggtgtagaccagagtgtttcttaaatggtgtaattttgtcctctctgtgtcctggggaatactggccatgcctggagacatatcactcaatttctctgaggacacagataggatggggtgtctgtgttatttgtggggtacagagatgaaagaggggtgggatccacactgagagagtggagagtgacatgtgctggacactgtccatgaagcactgagcagaagctggaggcacaacgcaccagacactcacagcaaggatggagctgaaaacataacccactctgtcctggaggcactgggaagcctagagaaggctgtgagccaaggagggagggtcttcctttggcatgggatggggatgaagtaaggagagggactggaccccctggaagctgattcactatggggggaggtgtattgaagtcctccagacaaccctcagatttgatgatttcctagtagaactcacagaaataaagagctgttatactgtg

SEQ ID NO: 151 - protein, 218 aa, Homo sapiens
  kallikrein 3 isoform 4
MWVPVVFLTLSVTWIGAAPLILSRIVGGWECEKHSQPWQVLVASRGRAVCGGVLVHPQWVLTAAHCIRKPGDDSSHDLMLLRLSEPAELTDAVKVMDLPTQEPALGTTCYASGWGSIEPEEFLTPKKLQCVDLHVISNDVCAQVHPQKVTKFMLCAGRWTGGKSTCSGDSGGPLVCNGVLQGITSWGSEPCALPERPSLYTKVVHYRKWIKDTIVANP

SEQ ID NO: 152 - DNA, 1341 bp, Homo sapiens
  kallikrein 3 transcript variant 5
agccccaagcttaccacctgcacccggagagctgtgtcaccatgtgggtcccggttgtcttcctcaccctgtccgtgacgtggattggtgctgcacccctcatcctgtctcggattgtgggaggctgggagtgcgagaagcattcccaaccctggcaggtgcttgtggcctctcgtggcagggcagtctgcggcggtgttctggtgcacccccagtgggtcctcacagctgcccactgcatcaggaacaaaagcgtgatcttgctgggtcggcacagcctgtttcatcctgaagacacaggccaggtatttcaggtcagccacagcttcccacacccgctctacgatatgagcctcctgaagaatcgattcctcaggccaggtgatgactccagcattgaaccagaggagttcttgaccccaaagaaacttcagtgtgtggacctccatgttatttccaatgacgtgtgtgcgcaagttcaccctcagaaggtgaccaagttcatgctgtgtgctggacgctggacagggggcaaaagcacctgctcgggtgattctgggggcccacttgtctgtaatggtgtgcttcaaggtatcacgtcatggggcagtgaaccatgtgccctgcccgaaaggccttccctgtacaccaaggtggtgcattaccggaagtggatcaaggacaccatcgtggccaacccctgagcacccctatcaaccccctattgtagtaaacttggaaccttggaaatgaccaggccaagactcaagcctccccagttctactgacctttgtccttaggtgtgaggtccagggttgctaggaaaagaaatcagcagacacaggtgtagaccagagtgtttcttaaatggtgtaattttgtcctctctgtgtcctggggaatactggccatgcctggagacatatcactcaatttctctgaggacacagataggatggggtgtctgtgttatttgtggggtacagagatgaaagaggggtgggatccacactgagagagtggagagtgacatgtgctggacactgtccatgaagcactgagcagaagctggaggcacaacgcaccagacactcacagcaaggatggagctgaaaacataacccactctgtcctggaggcactgggaagcctagagaaggctgtgagccaaggagggagggtcttcctttggcatgggatggggatgaagtaaggagagggactggaccccctggaagctgattcactatggggggaggtgtattgaagtcctccagacaaccctcagatttgatgatttcctagtagaactcacagaaataaagagctgttatactgtg

SEQ ID NO: 153 - protein, 220 aa, Homo sapiens
  kallikrein 3 isoform 5
MWVPVVFLTLSVTWIGAAPLILSRIVGGWECEKHSQPWQVLVASRGRAVCGGVLVHPQWVLTAAHCIRNKSVILLGRHSLFHPEDTGQVFQVSHSFPHPLYDMSLLKNRFLRPGDDSSIEPEEFLTPKKLQCVDLHVISNDVCAQVHPQKVTKFMLCAGRWTGGKSTCSGDSGGPLVCNGVLQGITSWGSEPCALPERPSLYTKVVHYRKWIKDTIVANP

SEQ ID NO: 154 - DNA, 555 bp, Homo sapiens
  kallikrein 3 transcript variant 6
agccccaagcttaccacctgcacccggagagctgtgtcaccatgtgggtcccggttgtcttcctcaccctgtccgtgacgtggattggtgctgcacccctcatcctgtctcggattgtgggaggctgggagtgcgagaagcattcccaaccctggcaggtgcttgtggcctctcgtggcagggcagtctgcggcggtgttctggtgcacccccagtgggtcctcacagctgcccactgcatcaggaagtgagtaggggcctggggtctggggagcaggtgtctgtgtcccagaggaataacagctgggcattttccccaggataacctctaaggccagccttgggactgggggagagagggaaagttctggttcaggtcacatggggaggcagggttggggctggaccaccctccccatggctgcctgggtctccatctgtgttcctctatgtctctttgtgtcgctttcattatgtctcttggtaactggcttcggttgtgtctctccgtgtgactattttgttctctctctccctctcttctctgtcttcagt

SEQ ID NO: 155 - protein, 69 aa, Homo sapiens
  kallikrein 3 isoform 6
MWVPVVFLTLSVTWIGAAPLILSRIVGGWECEKHSQPWQVLVASRGRAVCGGVLVHPQWVLTAAHCIRK

SEQ ID NO: 156 - DNA, 807 bp, Homo sapiens
  Mesotrypsin
acactctaccaccatgaatccattcctgatccttgcctttgtgggagctgctgttgctgtcccctttgacgatgatgacaagattgttgggggctacacctgtgaggagaattctctcccctaccaggtgtccctgaattctggctcccacttctgcggtggctccctcatcagcgaacagtgggtggtatcagcagctcactgctacaagacccgcatccaggtgagactgggagagcacaacatcaaagtcctggaggggaatgagcagttcatcaatgcggccaagatcatccgccaccctaaatacaacagggacactctggacaatgacatcatgctgatcaaactctcctcacctgccgtcatcaatgcccgcgtgtccaccatctctctgcccaccgcccctccagctgctggcactgagtgcctcatctccggctggggcaacactctgagctttggtgctgactacccagacgagctgaagtgcctggatgctccggtgctgacccaggctgagtgtaaagcctcctaccctggaaagattaccaacagcatgttctgtgtgggcttccttgagggaggcaaggattcctgccagcgtgactctggtggccctgtggtctgcaacggacagctccaaggagttgtctcctggggccatggctgtgcctggaagaacaggcctggagtctacaccaaggtctacaactatgtggactggattaaggacaccatcgctgccaacagctaaagcccccggtccctctgcagtctctataccaataaagtggccctgctctc

SEQ ID NO: 157 - protein, 247 aa, Homo sapiens
  Mesotrypsin
MNPFLILAFVGAAVAVPFDDDDKIVGGYTCEENSLPYQVSLNSGSHFCGGSLISEQWVVSAAHCYKTRIQVRLGEHNIKVLEGNEQFINAAKIIRHPKYNRDTLDNDIMLIKLSSPAVINARVSTISLPTAPPAAGTECLISGWGNTLSFGADYPDELKCLDAPVLTQAECKASYPGKITNSMFCVGFLEGGKDSCQRDSGGPVVCNGQLQGVVSWGHGCAWKNRPGVYTKVYNYVDWIKDTIAANS

SEQ ID NO: 158 - DNA, 1055 bp, Homo sapiens
  pancreatic endopeptidase E form B (B)
acctgcatttccaccacctgttctgggagtggggcccagtcagccccctttgcttaccttctgccctatattagagccccaggttctgtgcccttttcctatcatcgcaaaactcatgatgctccggctgctcagttccctcctccttgtggccgttgcctcaggctatggcccaccttcctctcgcccttccagccgcgttgtcaatggtgaggatgcggtcccctacagctggccctggcaggtttccctgcagtatgagaaaagcggaagcttctaccacacctgtggcggtagcctcatcgcccccgactgggttgtgactgccggccactgcatctcgagctcccggacctaccaggtggtgttgggcgagtacgaccgtgctgtgaaggagggccccgagcaggtgatccccatcaactctggggacctctttgtgcatccactctggaaccgctcgtgtgtggcctgtggcaatgacatcgccctcatcaagctctcacgcagcgcccagctgggagacgccgtccagctcgcctcactccctccggctggtgacatccttcccaacgagacaccctgctacatcaccggctggggccgtctctataccaacgggccactcccagacaagctgcaggaggccctgctgccggtggtggactatgaacactgctccaggtggaactggtggggttcctccgtgaagaagaccatggtgtgtgctggaggggacatccgctccggctgcaatggtgactctggaggacccctcaactgccccacagaggatggtggctggcaggtccatggcgtgaccagctttgtttctgcctttggctgcaacacccgcaggaagcccacggtgttcactcgagtctccgccttcattgactggattgaggagaccatagcaagccactagaaccaaggcccagctggcagtgctgatcgatcccacatcctgaataaagaataaagatctctcagaaaattccaaaaaaaaaaaaaaaaaaaaaaaaaaaaaaaaaaaaaaaaaaaaaaaaaaaaaa

SEQ ID NO: 159 - protein, 270 aa, Homo sapiens
  pancreatic endopeptidase E form B (B)
MMLRLLSSLLLVAVASGYGPPSSRPSSRVVNGEDAVPYSWPWQVSLQYEKSGSFYHTCGGSLIAPDWVVTAGHCISSSRTYQVVLGEYDRAVKEGPEQVIPINSGDLFVHPLWNRSCVACGNDIALIKLSRSAQLGDAVQLASLPPAGDILPNETPCYITGWGRLYTNGPLPDKLQEALLPVVDYEHCSRWNWWGSSVKKTMVCAGGDIRSGCNGDSGGPLNCPTEDGGWQVHGVTSFVSAFGCNTRRKPTVFTRVSAFIDWIEETIASH

SEQ ID NO: 160 - DNA, 941 bp, Homo sapiens
  pancreatic elastase II form B (Homos sapiens) (IIB)
cttacagaactcccacggacacaccatgattaggaccctgctgctgtccactttggtggctggagccctcagttgtggggtctccacttacgcgcctgatatgtctaggatgcttggaggtgaagaagcgaggcccaacagctggccctggcaggtctccctgcagtacagctccaatggccagtggtaccacacctgcggagggtccctgatagccaacagctgggtcctgacggctgcccactgcatcagctcctccgggatctaccgcgtgatgctgggccagcataacctctacgttgcagagtccggctcgctggccgtcagtgtctctaagattgtggtgcacaaggactggaactccgaccaggtctccaaagggaacgacattgccctgctcaaactggctaaccccgtctccctcaccgacaagatccagctggcctgcctccctcctgccggcaccattctacccaacaactacccctgctacgtcacgggctggggaaggctgcagaccaacggggctctccctgatgacctgaagcagggccggttgctggttgtggactatgccacctgctccagctctggctggtggggcagcaccgtgaagacgaatatgatctgtgctgggggtgatggcgtgatatgcacctgcaacggagactccggtgggccgctgaactgtcaggcatctgacggccggtgggaggtgcatggcatcggcagcctcacgtcggtccttggttgcaactactactacaagccctccatcttcacgcgggtctccaactacaacgactggatcaattcggtgattgcaaataactaaccaaaagaagtccctgggactgtttcagacttggaaaggtcacagaaggaaaataatattatataaagtgacaactatgcaaatcacaaaaaaaaaaaaaaaaaaa

SEQ ID NO: 161 - protein, 269 aa, Homo sapiens
  pancreatic elastase II form B (Homos sapiens) (IIB)
MIRTLLLSTLVAGALSCGVSTYAPDMSRMLGGEEARPNSWPWQVSLQYSSNGQWYHTCGGSLIANSWVLTAAHCISSSGIYRVMLGQHNLYVAESGSLAVSVSKIVVHKDWNSDQVSKGNDIALLKLANPVSLTDKIQLACLPPAGTILPNNYPCYVTGWGRLQTNGALPDDLKQGRLLVVDYATCSSSGWWGSTVKTNMICAGGDGVICTCNGDSGGPLNCQASDGRWEVHGIGSLTSVLGCNYYYKPSIFTRVSNYNDWINSVIANN

SEQ ID NO: 162 - DNA, 2048 bp, Homo sapiens
  coagulation factor XIIa
ctattgatctggactcctggataggcagctggaccaacggacggacgccatgagggctctgctgctcctggggttcctgctggtgagcttggagtcaacactttcgattccaccttgggaagcccccaaggagcataagtacaaagctgaagagcacacagtcgttctcactgtcaccggggagccctgccacttccccttccagtaccaccggcagctgtaccacaaatgtacccacaagggccggccaggccctcagccctggtgtgctaccacccccaactttgatcaggaccagcgatggggatactgtttggagcccaagaaagtgaaagaccactgcagcaaacacagcccctgccagaaaggagggacctgtgtgaacatgccaagcggcccccactgtctctgtccacaacacctcactggaaaccactgccagaaagagaagtgctttgagcctcagcttctccggtttttccacaagaatgagatatggtatagaactgagcaagcagctgtggccagatgccagtgcaagggtcctgatgcccactgccagcggctggccagccaggcctgccgcaccaacccgtgcctccatgggggtcgctgcctagaggtggagggccaccgcctgtgccactgcccggtgggctacaccggacccttctgcgacgtggacaccaaggcaagctgctatgatggccgcgggctcagctaccgcggcctggccaggaccacgctctcgggtgcgccctgtcagccgtgggcctcggaggccacctaccggaacgtgactgccgagcaagcgcggaactggggactgggcggccacgccttctgccggaacccggacaacgacatccgcccgtggtgcttcgtgctgaaccgcgaccggctgagctgggagtactgcgacctggcacagtgccagaccccaacccaggcggcgcctccgaccccggtgtcccctaggcttcatgtcccactcatgcccgcgcagccggcaccgccgaagcctcagcccacgacccggaccccgcctcagtcccagaccccgggagccttgccggcgaagcgggagcagccgccttccctgaccaggaacggcccactgagctgcgggcagcggctccgcaagagtctgtcttcgatgacccgcgtcgttggcgggctggtggcgctacgcggggcgcacccctacatcgccgcgctgtactggggccacagtttctgcgccggcagcctcatcgccccctgctgggtgctgacggccgctcactgcctgcaggaccggcccgcacccgaggatctgacggtggtgctcggccaggaacgccgtaaccacagctgtgagccgtgccagacgttggccgtgcgctcctaccgcttgcacgaggccttctcgcccgtcagctaccagcacgacctggctctgttgcgccttcaggaggatgcggacggcagctgcgcgctcctgtcgccttacgttcagccggtgtgcctgccaagcggcgccgcgcgaccctccgagaccacgctctgccaggtggccggctggggccaccagttcgagggggcggaggaatatgccagcttcctgcaggaggcgcaggtaccgttcctctccctggagcgctgctcagccccggacgtgcacggatcctccatcctccccggcatgctctgcgcagggttcctcgagggcggcaccgatgcgtgccagggtgattccggaggcccgctggtgtgtgaggaccaagctgcagagcgccggctcaccctgcaaggcatcatcagctggggatcgggctgtggtgaccgcaacaagccaggcgtctacaccgatgtggcctactacctggcctggatccgggagcacaccgtttcctgattgctcagggactcatctttccctccttggtgattccgcagtgagagagtggctggggcatggaaggcaagattgtgtcccattcccccagtgcggccagctccgcgccaggatggcgaggaactcaataaagtgctttgaaaatgctgag

SEQ ID NO: 163 - protein, 615 aa, Homo sapiens
  coagulation factor XIIa
MRALLLLGFLLVSLESTLSIPPWEAPKEHKYKAEEHTVVLTVTGEPCHFPFQYHRQLYHKCTHKGRPGPQPWCATTPNFDQDQRWGYCLEPKKVKDHCSKHSPCQKGGTCVNMPSGPHCLCPQHLTGNHCQKEKCFEPQLLRFFHKNEIWYRTEQAAVARCQCKGPDAHCQRLASQACRTNPCLHGGRCLEVEGHRLCHCPVGYTGPFCDVDTKASCYDGRGLSYRGLARTTLSGAPCQPWASEATYRNVTAEQARNWGLGGHAFCRNPDNDIRPWCFVLNRDRLSWEYCDLAQCQTPTQAAPPTPVSPRLHVPLMPAQPAPPKPQPTTRTPPQSQTPGALPAKREQPPSLTRNGPLSCGQRLRKSLSSMTRVVGGLVALRGAHPYIAALYWGHSFCAGSLIAPCWVLTAAHCLQDRPAPEDLTVVLGQERRNHSCEPCQTLAVRSYRLHEAFSPVSYQHDLALLRLQEDADGSCALLSPYVQPVCLPSGAARPSETTLCQVAGWGHQFEGAEEYASFLQEAQVPFLSLERCSAPDVHGSSILPGMLCAGFLEGGTDACQGDSGGPLVCEDQAAERRLTLQGIISWGSGCGDRNKPGVYTDVAYYLAWIREHTVS

SEQ ID NO: 164 - DNA, 2245 bp, Homo sapiens
  plasma kallikrein
agaacagcttgaagaccgttcatttttaagtgacaagagactcacctccaagaagcaattgtgttttcagaatgattttattcaagcaagcaacttatttcatttccttgtttgctacagtttcctgtggatgtctgactcaactctatgaaaacgccttcttcagaggtggggatgtagcttccatgtacaccccaaatgcccaatactgccagatgaggtgcacattccacccaaggtgtttgctattcagttttcttccagcaagttcaatcaatgacatggagaaaaggtttggttgcttcttgaaagatagtgttacaggaaccctgccaaaagtacatcgaacaggtgcagtttctggacattccttgaagcaatgtggtcatcaaataagtgcttgccatcgagacatttataaaggagttgatatgagaggagtcaattttaatgtgtctaaggttagcagtgttgaagaatgccaaaaaaggtgcaccaataacattcgctgccagtttttttcatatgccacgcaaacatttcacaaggcagagtaccggaacaattgcctattaaagtacagtcccggaggaacacctaccgctataaaggtgctgagtaacgtggaatctggattctcactgaagccctgtgccctttcagaaattggttgccacatgaacatcttccagcatcttgcgttctcagatgtggatgttgccagggttctcactccagatgcttttgtgtgtcggaccatctgcacctatcaccccaactgcctcttctttacattctatacaaatgtatggaaaatcgagtcacaaagaaatgtttgtcttcttaaaacatctgaaagtggcacaccaagttcctctactcctcaagaaaacaccatatctggatatagccttttaacctgcaaaagaactttacctgaaccctgccattctaaaatttacccgggagttgactttggaggagaagaattgaatgtgacttttgttaaaggagtgaatgtttgccaagagacttgcacaaagatgattcgctgtcagtttttcacttattctttactcccagaagactgtaaggaagagaagtgtaagtgtttcttaagattatctatggatggttctccaactaggattgcgtatgggacacaagggagctctggttactctttgagattgtgtaacactggggacaactctgtctgcacaacaaaaacaagcacacgcattgttggaggaacaaactcttcttggggagagtggccctggcaggtgagcctgcaggtgaagctgacagctcagaggcacctgtgtggagggtcactcataggacaccagtgggtcctcactgctgcccactgctttgatgggcttcccctgcaggatgtttggcgcatctatagtggcattttaaatctgtcagacattacaaaagatacacctttctcacaaataaaagagattattattcaccaaaactataaagtctcagaagggaatcatgatatcgccttgataaaactccaggctcctttgaattacactgaattccaaaaaccaatatgcctaccttccaaaggtgacacaagcacaatttataccaactgttgggtaaccggatggggcttctcgaaggagaaaggtgaaatccaaaatattctacaaaaggtaaatattcctttggtaacaaatgaagaatgccagaaaagatatcaagattataaaataacccaacggatggtctgtgctggctataaagaagggggaaaagatgcttgtaagggagattcaggtggtcccttagtttgcaaacacaacggaatgtggcgtttggtgggcatcacaagctggggtgaaggctgtgcccgcagggagcaacctggtgtctacaccaaagtcgctgagtacatggactggattttagagaaaacacagagcagtgatggaaaagctcagatgcagtcaccagcatgagaagcagtccagagtctaggcaatttttacaacctgagttcaagtcaaattctgagcctggggggtcctcatctgcaaagcatggagagtggcatcttctttgcatcctaaggacgaaagacacagtgcactcagagctgctgaggacaatgtctgctgaagcccgctttcagcacgccgtaaccaggggctgacaatgcgaggtcgcaactgagatctccatgactgtgtgttgtgaaataaaatggtgaaagatc

SEQ ID NO: 165 - protein, 638 aa, Homo sapiens
  plasma kallikrein
MILFKQATYFISLFATVSCGCLTQLYENAFFRGGDVASMYTPNAQYCQMRCTFHPRCLLFSFLPASSINDMEKRFGCFLKDSVTGTLPKVHRTGAVSGHSLKQCGHQISACHRDIYKGVDMRGVNFNVSKVSSVEECQKRCTNNIRCQFFSYATQTFHKAEYRNNCLLKYSPGGTPTAIKVLSNVESGFSLKPCALSEIGCHMNIFQHLAFSDVDVARVLTPDAFVCRTICTYHPNCLFFTFYTNVWKIESQRNVCLLKTSESGTPSSSTPQENTISGYSLLTCKRTLPEPCHSKIYPGVDFGGEELNVTFVKGVNVCQETCTKMIRCQFFTYSLLPEDCKEEKCKCFLRLSMDGSPTRIAYGTQGSSGYSLRLCNTGDNSVCTTKTSTRIVGGTNSSWGEWPWQVSLQVKLTAQRHLCGGSLIGHQWVLTAAHCFDGLPLQDVWRIYSGILNLSDITKDTPFSQIKEIIIHQNYKVSEGNHDIALIKLQAPLNYTEFQKPICLPSKGDTSTIYTNCWVTGWGFSKEKGEIQNILQKVNIPLVTNEECQKRYQDYKITQRMVCAGYKEGGKDACKGDSGGPLVCKHNGMWRLVGITSWGEGCARREQPGVYTKVAEYMDWILEKTQSSDGKAQMQSPA

SEQ ID NO: 166 - DNA, 2217 bp, Homo sapiens
  coagulation factor XIa transcript variant 1
tgctgtactgagagagaatgttacataacattgagaactagtacaagtaaatattaaagtgaagtgaccatttcctacacaagctcattcagaggaggatgaagaccattttggaggaagaaaagcacccttattaagaattgcagcaagtaagccaacaaggtcttttcaggatgattttcttatatcaagtggtacatttcattttatttacttcagtttctggtgaatgtgtgactcagttgttgaaggacacctgctttgaaggaggggacattactacggtcttcacaccaagcgccaagtactgccaggtagtctgcacttaccacccaagatgtttactcttcactttcacggcggaatcaccatctgaggatcccacccgatggtttacttgtgtcctgaaagacagtgttacagaaacactgccaagagtgaataggacagcagcgatttctgggtattctttcaagcaatgctcacaccaaataagcgcttgcaacaaagacatttatgtggacctagacatgaagggcataaactataacagctcagttgccaagagtgctcaagaatgccaagaaagatgcacggatgacgtccactgccactttttcacgtacgccacaaggcagtttcccagcctggagcatcgtaacatttgtctactgaagcacacccaaacagggacaccaaccagaataacgaagctcgataaagtggtgtctggattttcactgaaatcctgtgcactttctaatctggcttgtattagggacattttccctaatacggtgtttgcagacagcaacatcgacagtgtcatggctcccgatgcttttgtctgtggccgaatctgcactcatcatcccggttgcttgttttttaccttcttttcccaggaatggcccaaagaatctcaaagaaatctttgtctccttaaaacatctgagagtggattgcccagtacacgcattaaaaagagcaaagctctttctggtttcagtctacaaagctgcaggcacagcatcccagtgttctgccattcttcattttaccatgacactgatttcttgggagaagaactggatattgttgctgcaaaaagtcacgaggcctgccagaaactgtgcaccaatgccgtccgctgccagttttttacctataccccagcccaagcatcctgcaacgaagggaagggcaagtgttacttaaagctttcttcaaacggatctccaactaaaatacttcacgggagaggaggcatctctggatacacattaaggttgtgtaaaatggataatgagtgtaccaccaaaatcaagcccaggatcgttggaggaactgcgtctgttcgtggtgagtggccgtggcaggtgaccctgcacacaacctcacccactcagagacacctgtgtggaggctccatcattggaaaccagtggatattaacagccgctcactgtttctatggggtagagtcacctaagattttgcgtgtctacagtggcattttaaatcaatctgaaataaaagaggacacatctttctttggggttcaagaaataataatccatgatcagtataaaatggcagaaagcgggtatgatattgccttgttgaaactggaaaccacagtgaattacacagattctcaacgacccatatgcctgccttccaaaggagatagaaatgtaatatacactgattgctgggtgactggatgggggtacagaaaactaagagacaaaatacaaaatactctccagaaagccaagatacccttagtgaccaacgaagagtgccagaagagatacagaggacataaaataacccataagatgatctgtgccggctacagggaaggagggaaggacgcttgcaagggagattcgggaggccctctgtcctgcaaacacaatgaggtctggcatctggtaggcatcacgagctggggcgaaggctgtgctcaaagggagcggccaggtgtttacaccaacgtggtcgagtacgtggactggattctggagaaaactcaagcagtgtgaatgggttcccaggggccattggagtccctgaaggacccaggatttgctgggagagggtgttgagttcactgtgccagcatgcttcctccacagtaacacgctgaaggggcttggtgtttgtaagaaaatgctagaagaaaacaaactgtcacaagttgttatgtcc

SEQ ID NO: 167 - protein, 625 aa, Homo sapiens
  coagulation factor XIa isoform 1
MIFLYQVVHFILFTSVSGECVTQLLKDTCFEGGDITTVFTPSAKYCQVVCTYHPRCLLFTFTAESPSEDPTRWFTCVLKDSVTETLPRVNRTAAISGYSFKQCSHQISACNKDIYVDLDMKGINYNSSVAKSAQECQERCTDDVHCHFFTYATRQFPSLEHRNICLLKHTQTGTPTRITKLDKVVSGFSLKSCALSNLACIRDIFPNTVFADSNIDSVMAPDAFVCGRICTHHPGCLFFTFFSQEWPKESQRNLCLLKTSESGLPSTRIKKSKALSGFSLQSCRHSIPVFCHSSFYHDTDFLGEELDIVAAKSHEACQKLCTNAVRCQFFTYTPAQASCNEGKGKCYLKLSSNGSPTKILHGRGGISGYTLRLCKMDNECTTKIKPRIVGGTASVRGEWPWQVTLHTTSPTQRHLCGGSIIGNQWILTAAHCFYGVESPKILRVYSGILNQSEIKEDTSFFGVQEIIIHDQYKMAESGYDIALLKLETTVNYTDSQRPICLPSKGDRNVIYTDCWVTGWGYRKLRDKIQNTLQKAKIPLVTNEECQKRYRGHKITHKMICAGYREGGKDACKGDSGGPLSCKHNEVWHLVGITSWGEGCAQRERPGVYTNVVEYVDWILEKTQAV

SEQ ID NO: 168 - DNA, 2055 bp, Homo sapiens
  coagulation factor XIa transcript variant  2
tgctgtactgagagagaatgttacataacattgagaactagtacaagtaaatattaaagtgaagtgaccatttcctacacaagctcattcagaggaggatgaagaccattttggaggaagaaaagcacccttattaagaattgcagcaagtaagccaacaaggtcttttcaggatgattttcttatatcaagtggtacatttcattttatttacttcagtttctggtgaatgtgtgactcagttgttgaaggacacctgctttgaaggaggggacattactacggtcttcacaccaagcgccaagtactgccaggtagtctgcacttaccacccaagatgtttactcttcactttcacggcggaatcaccatctgaggatcccacccgatggtttacttgtgtcctgaaagacagtgttacagaaacactgccaagagtgaataggacagcagcgatttctgggtattctttcaagcaatgctcacaccaaataagtaacatttgtctactgaagcacacccaaacagggacaccaaccagaataacgaagctcgataaagtggtgtctggattttcactgaaatcctgtgcactttctaatctggcttgtattagggacattttccctaatacggtgtttgcagacagcaacatcgacagtgtcatggctcccgatgcttttgtctgtggccgaatctgcactcatcatcccggttgcttgttttttaccttcttttcccaggaatggcccaaagaatctcaaagaaatctttgtctccttaaaacatctgagagtggattgcccagtacacgcattaaaaagagcaaagctctttctggtttcagtctacaaagctgcaggcacagcatcccagtgttctgccattcttcattttaccatgacactgatttcttgggagaagaactggatattgttgctgcaaaaagtcacgaggcctgccagaaactgtgcaccaatgccgtccgctgccagttttttacctataccccagcccaagcatcctgcaacgaagggaagggcaagtgttacttaaagctttcttcaaacggatctccaactaaaatacttcacgggagaggaggcatctctggatacacattaaggttgtgtaaaatggataatgagtgtaccaccaaaatcaagcccaggatcgttggaggaactgcgtctgttcgtggtgagtggccgtggcaggtgaccctgcacacaacctcacccactcagagacacctgtgtggaggctccatcattggaaaccagtggatattaacagccgctcactgtttctatggggtagagtcacctaagattttgcgtgtctacagtggcattttaaatcaatctgaaataaaagaggacacatctttctttggggttcaagaaataataatccatgatcagtataaaatggcagaaagcgggtatgatattgccttgttgaaactggaaaccacagtgaattacacagattctcaacgacccatatgcctgccttccaaaggagatagaaatgtaatatacactgattgctgggtgactggatgggggtacagaaaactaagagacaaaatacaaaatactctccagaaagccaagatacccttagtgaccaacgaagagtgccagaagagatacagaggacataaaataacccataagatgatctgtgccggctacagggaaggagggaaggacgcttgcaagggagattcgggaggccctctgtcctgcaaacacaatgaggtctggcatctggtaggcatcacgagctggggcgaaggctgtgctcaaagggagcggccaggtgtttacaccaacgtggtcgagtacgtggactggattctggagaaaactcaagcagtgtgaatgggttcccaggggccattggagtccctgaaggacccaggatttgctgggagagggtgttgagttcactgtgccagcatgcttcctccacagtaacacgctgaaggggcttggtgtttgtaagaaaatgctagaagaaaacaaactgtcacaagttgttatgtcc

SEQ ID NO: 169 - protein, 571 aa, Homo sapiens
  coagulation factor XIa isoform 2
MIFLYQVVHFILFTSVSGECVTQLLKDTCFEGGDITTVFTPSAKYCQVVCTYHPRCLLFTFTAESPSEDPTRWFTCVLKDSVTETLPRVNRTAAISGYSFKQCSHQISNICLLKHTQTGTPTRITKLDKVVSGFSLKSCALSNLACIRDIFPNTVFADSNIDSVMAPDAFVCGRICTHHPGCLFFTFFSQEWPKESQRNLCLLKTSESGLPSTRIKKSKALSGFSLQSCRHSIPVFCHSSFYHDTDFLGEELDIVAAKSHEACQKLCTNAVRCQFFTYTPAQASCNEGKGKCYLKLSSNGSPTKILHGRGGISGYTLRLCKMDNECTTKIKPRIVGGTASVRGEWPWQVTLHTTSPTQRHLCGGSIIGNQWILTAAHCFYGVESPKILRVYSGILNQSEIKEDTSFFGVQEIIIHDQYKMAESGYDIALLKLETTVNYTDSQRPICLPSKGDRNVIYTDCWVTGWGYRKLRDKIQNTLQKAKIPLVTNEECQKRYRGHKITHKMICAGYREGGKDACKGDSGGPLSCKHNEVWHLVGITSWGEGCAQRERPGVYTNVVEYVDWILEKTQAV

SEQ ID NO: 170 - DNA, 2804 bp, Homo sapiens
  coagulation factor IXa
accactttcacaatctgctagcaaaggttatgcagcgcgtgaacatgatcatggcagaatcaccaggcctcatcaccatctgccttttaggatatctactcagtgctgaatgtacagtttttcttgatcatgaaaacgccaacaaaattctgaatcggccaaagaggtataattcaggtaaattggaagagtttgttcaagggaaccttgagagagaatgtatggaagaaaagtgtagttttgaagaagcacgagaagtttttgaaaacactgaaagaacaactgaattttggaagcagtatgttgatggagatcagtgtgagtccaatccatgtttaaatggcggcagttgcaaggatgacattaattcctatgaatgttggtgtccctttggatttgaaggaaagaactgtgaattagatgtaacatgtaacattaagaatggcagatgcgagcagttttgtaaaaatagtgctgataacaaggtggtttgctcctgtactgagggatatcgacttgcagaaaaccagaagtcctgtgaaccagcagtgccatttccatgtggaagagtttctgtttcacaaacttctaagctcacccgtgctgagactgtttttcctgatgtggactatgtaaattctactgaagctgaaaccattttggataacatcactcaaagcacccaatcatttaatgacttcactcgggttgttggtggagaagatgccaaaccaggtcaattcccttggcaggttgttttgaatggtaaagttgatgcattctgtggaggctctatcgttaatgaaaaatggattgtaactgctgcccactgtgttgaaactggtgttaaaattacagttgtcgcaggtgaacataatattgaggagacagaacatacagagcaaaagcgaaatgtgattcgaattattcctcaccacaactacaatgcagctattaataagtacaaccatgacattgcccttctggaactggacgaacccttagtgctaaacagctacgttacacctatttgcattgctgacaaggaatacacgaacatcttcctcaaatttggatctggctatgtaagtggctggggaagagtcttccacaaagggagatcagctttagttcttcagtaccttagagttccacttgttgaccgagccacatgtcttcgatctacaaagttcaccatctataacaacatgttctgtgctggcttccatgaaggaggtagagattcatgtcaaggagatagtgggggaccccatgttactgaagtggaagggaccagtttcttaactggaattattagctggggtgaagagtgtgcaatgaaaggcaaatatggaatatataccaaggtatcccggtatgtcaactggattaaggaaaaaacaaagctcacttaatgaaagatggatttccaaggttaattcattggaattgaaaattaacagggcctctcactaactaatcactttcccatcttttgttagatttgaatatatacattctatgatcattgctttttctctttacaggggagaatttcatattttacctgagcaaattgattagaaaatggaaccactagaggaatataatgtgttaggaaattacagtcatttctaagggcccagcccttgacaaaattgtgaagttaaattctccactctgtccatcagatactatggttctccactatggcaactaactcactcaattttccctccttagcagcattccatcttcccgatcttctttgcttctccaaccaaaacatcaatgtttattagttctgtatacagtacaggatctttggtctactctatcacaaggccagtaccacactcatgaagaaagaacacaggagtagctgagaggctaaaactcatcaaaaacactactccttttcctctaccctattcctcaatcttttaccttttccaaatcccaatccccaaatcagtttttctctttcttactccctctctcccttttaccctccatggtcgttaaaggagagatggggagcatcattctgttatacttctgtacacagttatacatgtctatcaaacccagacttgcttccatagtggagacttgcttttcagaacatagggatgaagtaaggtgcctgaaaagtttgggggaaaagtttctttcagagagttaagttattttatatatataatatatatataaaatatataatatacaatataaatatatagtgtgtgtgtgtatgcgtgtgtgtagacacacacgcatacacacatataatggaagcaataagccattctaagagcttgtatggttatggaggtctgactaggcatgatttcacgaaggcaagattggcatatcattgtaactaaaaaagctgacattgacccagacatattgtactctttctaaaaataataataataatgctaacagaaagaagagaaccgttcgtttgcaatctacagctagtagagactttgaggaagaattcaacagtgtgtcttcagcagtgttcagagccaagcaagaagttgaagttgcctagaccagaggacataagtatcatgtctcctttaactagcataccccgaagtggagaagggtgcagcaggctcaaaggcataagtcattccaatcagccaactaagttgtccttttctggtttcgtgttcaccatggaacattttgattatagttaatccttctatcttgaatcttctagagagttgctgaccaactgacgtatgtttccctttgtgaattaataaactggtgttctggttcat

SEQ ID NO: 171 - protein, 461 aa, Homo sapiens
  coagulation factor IXa
MQRVNMIMAESPGLITICLLGYLLSAECTVFLDHENANKILNRPKRYNSGKLEEFVQGNLERECMEEKCSFEEAREVFENTERTTEFWKQYVDGDQCESNPCLNGGSCKDDINSYECWCPFGFEGKNCELDVTCNIKNGRCEQFCKNSADNKVVCSCTEGYRLAENQKSCEPAVPFPCGRVSVSQTSKLTRAETVFPDVDYVNSTEAETILDNITQSTQSFNDFTRVVGGEDAKPGQFPWQVVLNGKVDAFCGGSIVNEKWIVTAAHCVETGVKITVVAGEHNIEETEHTEQKRNVIRIIPHHNYNAAINKYNHDIALLELDEPLVLNSYVTPICIADKEYTNIFLKFGSGYVSGWGRVFHKGRSALVLQYLRVPLVDRATCLRSTKFTIYNNMFCAGFHEGGRDSCQGDSGGPHVTEVEGTSFLTGIISWGEECAMKGKYGIYTKVSRYVNWIKEKTKLT

SEQ ID NO: 172 - DNA, 2478 bp, Homo sapiens
  coagulation factor VIIa transcript variant 1
agtcccatggggaatgtcaacaggcaggggcagcactgcagagatttcatcatggtctcccaggccctcaggctcctctgccttctgcttgggcttcagggctgcctggctgcaggcggggtcgctaaggcctcaggaggagaaacacgggacatgccgtggaagccggggcctcacagagtcttcgtaacccaggaggaagcccacggcgtcctgcaccggcgccggcgcgccaacgcgttcctggaggagctgcggccgggctccctggagagggagtgcaaggaggagcagtgctccttcgaggaggcccgggagatcttcaaggacgcggagaggacgaagctgttctggatttcttacagtgatggggaccagtgtgcctcaagtccatgccagaatgggggctcctgcaaggaccagctccagtcctatatctgcttctgcctccctgccttcgagggccggaactgtgagacgcacaaggatgaccagctgatctgtgtgaacgagaacggcggctgtgagcagtactgcagtgaccacacgggcaccaagcgctcctgtcggtgccacgaggggtactctctgctggcagacggggtgtcctgcacacccacagttgaatatccatgtggaaaaatacctattctagaaaaaagaaatgccagcaaaccccaaggccgaattgtggggggcaaggtgtgccccaaaggggagtgtccatggcaggtcctgttgttggtgaatggagctcagttgtgtggggggaccctgatcaacaccatctgggtggtctccgcggcccactgtttcgacaaaatcaagaactggaggaacctgatcgcggtgctgggcgagcacgacctcagcgagcacgacggggatgagcagagccggcgggtggcgcaggtcatcatccccagcacgtacgtcccgggcaccaccaaccacgacatcgcgctgctccgcctgcaccagcccgtggtcctcactgaccatgtggtgcccctctgcctgcccgaacggacgttctctgagaggacgctggccttcgtgcgcttctcattggtcagcggctggggccagctgctggaccgtggcgccacggccctggagctcatggtgctcaacgtgccccggctgatgacccaggactgcctgcagcagtcacggaaggtgggagactccccaaatatcacggagtacatgttctgtgccggctactcggatggcagcaaggactcctgcaagggggacagtggaggcccacatgccacccactaccggggcacgtggtacctgacgggcatcgtcagctggggccagggctgcgcaaccgtgggccactttggggtgtacaccagggtctcccagtacatcgagtggctgcaaaagctcatgcgctcagagccacgcccaggagtcctcctgcgagccccatttccctagcccagcagccctggcctgtggagagaaagccaaggctgcgtcgaactgtcctggcaccaaatcccatatattcttctgcagttaatggggtagaggagggcatgggagggagggagaggtggggagggagacagagacagaaacagagagagacagagacagagagagactgagggagagactctgaggacatggagagagactcaaagagactccaagattcaaagagactaatagagacacagagatggaatagaaaagatgagaggcagaggcagacaggcgctggacagaggggcaggggagtgccaaggttgtcctggaggcagacagcccagctgagcctccttacctcccttcagccaagccccacctgcacgtgatctgctggccctcaggctgctgctctgccttcattgctggagacagtagaggcatgaacacacatggatgcacacacacacacgccaatgcacacacacagagatatgcacacacacggatgcacacacagatggtcacacagagatacgcaaacacaccgatgcacacgcacatagagatatgcacacacagatgcacacacagatatacacatggatgcacgcacatgccaatgcacgcacacatcagtgcacacggatgcacagagatatgcacacaccgatgtgcgcacacacagatatgcacacacatggatgagcacacacacaccaagtgcgcacacacaccgatgtacacacacagatgcacacacagatgcacacacaccgatgctgactccatgtgtgctgtcctctgaaggcggttgtttagctctcacttttctggttcttatccattatcatcttcacttcagacaattcagaagcatcaccatgcatggtggcgaatgcccccaaactctcccccaaatgtatttctcccttcgctgggtgccgggctgcacagactattccccacctgcttcccagcttcacaataaacggctgcgtctcctccgcacacctgtggtgcctgccaccc

SEQ ID NO: 173 - protein, 466 aa, Homo sapiens
  coagulation factor VIIa isoform 1
MVSQALRLLCLLLGLQGCLAAGGVAKASGGETRDMPWKPGPHRVFVTQEEAHGVLHRRRRANAFLEELRPGSLERECKEEQCSFEEAREIFKDAERTKLFWISYSDGDQCASSPCQNGGSCKDQLQSYICFCLPAFEGRNCETHKDDQLICVNENGGCEQYCSDHTGTKRSCRCHEGYSLLADGVSCTPTVEYPCGKIPILEKRNASKPQGRIVGGKVCPKGECPWQVLLLVNGAQLCGGTLINTIWVVSAAHCFDKIKNWRNLIAVLGEHDLSEHDGDEQSRRVAQVIIPSTYVPGTTNHDIALLRLHQPVVLTDHVVPLCLPERTFSERTLAFVRFSLVSGWGQLLDRGATALELMVLNVPRLMTQDCLQQSRKVGDSPNITEYMFCAGYSDGSKDSCKGDSGGPHATHYRGTWYLTGIVSWGQGCATVGHFGVYTRVSQYIEWLQKLMRSEPRPGVLLRAPFP

SEQ ID NO: 174 - DNA, 2412 bp, Homo sapiens
  coagulation factor VIIa transcript variant 2
agtcccatggggaatgtcaacaggcaggggcagcactgcagagatttcatcatggtctcccaggccctcaggctcctctgccttctgcttgggcttcagggctgcctggctgcagtcttcgtaacccaggaggaagcccacggcgtcctgcaccggcgccggcgcgccaacgcgttcctggaggagctgcggccgggctccctggagagggagtgcaaggaggagcagtgctccttcgaggaggcccgggagatcttcaaggacgcggagaggacgaagctgttctggatttcttacagtgatggggaccagtgtgcctcaagtccatgccagaatgggggctcctgcaaggaccagctccagtcctatatctgcttctgcctccctgccttcgagggccggaactgtgagacgcacaaggatgaccagctgatctgtgtgaacgagaacggcggctgtgagcagtactgcagtgaccacacgggcaccaagcgctcctgtcggtgccacgaggggtactctctgctggcagacggggtgtcctgcacacccacagttgaatatccatgtggaaaaatacctattctagaaaaaagaaatgccagcaaaccccaaggccgaattgtggggggcaaggtgtgccccaaaggggagtgtccatggcaggtcctgttgttggtgaatggagctcagttgtgtggggggaccctgatcaacaccatctgggtggtctccgcggcccactgtttcgacaaaatcaagaactggaggaacctgatcgcggtgctgggcgagcacgacctcagcgagcacgacggggatgagcagagccggcgggtggcgcaggtcatcatccccagcacgtacgtcccgggcaccaccaaccacgacatcgcgctgctccgcctgcaccagcccgtggtcctcactgaccatgtggtgcccctctgcctgcccgaacggacgttctctgagaggacgctggccttcgtgcgcttctcattggtcagcggctggggccagctgctggaccgtggcgccacggccctggagctcatggtgctcaacgtgccccggctgatgacccaggactgcctgcagcagtcacggaaggtgggagactccccaaatatcacggagtacatgttctgtgccggctactcggatggcagcaaggactcctgcaagggggacagtggaggcccacatgccacccactaccggggcacgtggtacctgacgggcatcgtcagctggggccagggctgcgcaaccgtgggccactttggggtgtacaccagggtctcccagtacatcgagtggctgcaaaagctcatgcgctcagagccacgcccaggagtcctcctgcgagccccatttccctagcccagcagccctggcctgtggagagaaagccaaggctgcgtcgaactgtcctggcaccaaatcccatatattcttctgcagttaatggggtagaggagggcatgggagggagggagaggtggggagggagacagagacagaaacagagagagacagagacagagagagactgagggagagactctgaggacatggagagagactcaaagagactccaagattcaaagagactaatagagacacagagatggaatagaaaagatgagaggcagaggcagacaggcgctggacagaggggcaggggagtgccaaggttgtcctggaggcagacagcccagctgagcctccttacctcccttcagccaagccccacctgcacgtgatctgctggccctcaggctgctgctctgccttcattgctggagacagtagaggcatgaacacacatggatgcacacacacacacgccaatgcacacacacagagatatgcacacacacggatgcacacacagatggtcacacagagatacgcaaacacaccgatgcacacgcacatagagatatgcacacacagatgcacacacagatatacacatggatgcacgcacatgccaatgcacgcacacatcagtgcacacggatgcacagagatatgcacacaccgatgtgcgcacacacagatatgcacacacatggatgagcacacacacaccaagtgcgcacacacaccgatgtacacacacagatgcacacacagatgcacacacaccgatgctgactccatgtgtgctgtcctctgaaggcggttgtttagctctcacttttctggttcttatccattatcatcttcacttcagacaattcagaagcatcaccatgcatggtggcgaatgcccccaaactctcccccaaatgtatttctcccttcgctgggtgccgggctgcacagactattccccacctgcttcccagcttcacaataaacggctgcgtctcctccgcacacctgtggtgcctgccaccc

SEQ ID NO: 175 - protein, 444 aa, Homo sapiens
  coagulation factor VIIa isoform 2
MVSQALRLLCLLLGLQGCLAAVFVTQEEAHGVLHRRRRANAFLEELRPGSLERECKEEQCSFEEAREIFKDAERTKLFWISYSDGDQCASSPCQNGGSCKDQLQSYICFCLPAFEGRNCETHKDDQLICVNENGGCEQYCSDHTGTKRSCRCHEGYSLLADGVSCTPTVEYPCGKIPILEKRNASKPQGRIVGGKVCPKGECPWQVLLLVNGAQLCGGTLINTIWVVSAAHCFDKIKNWRNLIAVLGEHDLSEHDGDEQSRRVAQVIIPSTYVPGTTNHDIALLRLHQPVVLTDHVVPLCLPERTFSERTLAFVRFSLVSGWGQLLDRGATALELMVLNVPRLMTQDCLQQSRKVGDSPNITEYMFCAGYSDGSKDSCKGDSGGPHATHYRGTWYLTGIVSWGQGCATVGHFGVYTRVSQYIEWLQKLMRSEPRPGVLLRAPFP

SEQ ID NO: 176 - DNA, 1502 bp, Homo sapiens
  coagulation factor Xa
cagggacacagtactcggccacaccatggggcgcccactgcacctcgtcctgctcagtgcctccctggctggcctcctgctgctcggggaaagtctgttcatccgcagggagcaggccaacaacatcctggcgagggtcacgagggccaattcctttcttgaagagatgaagaaaggacacctcgaaagagagtgcatggaagagacctgctcatacgaagaggcccgcgaggtctttgaggacagcgacaagacgaatgaattctggaataaatacaaagatggcgaccagtgtgagaccagtccttgccagaaccagggcaaatgtaaagacggcctcggggaatacacctgcacctgtttagaaggattcgaaggcaaaaactgtgaattattcacacggaagctctgcagcctggacaacggggactgtgaccagttctgccacgaggaacagaactctgtggtgtgctcctgcgcccgcgggtacaccctggctgacaacggcaaggcctgcattcccacagggccctacccctgtgggaaacagaccctggaacgcaggaagaggtcagtggcccaggccaccagcagcagcggggaggcccctgacagcatcacatggaagccatatgatgcagccgacctggaccccaccgagaaccccttcgacctgcttgacttcaaccagacgcagcctgagaggggcgacaacaacctcaccaggatcgtgggaggccaggaatgcaaggacggggagtgtccctggcaggccctgctcatcaatgaggaaaacgagggtttctgtggtggaaccattctgagcgagttctacatcctaacggcagcccactgtctctaccaagccaagagattcaaggtgagggtaggggaccggaacacggagcaggaggagggcggtgaggcggtgcacgaggtggaggtggtcatcaagcacaaccggttcacaaaggagacctatgacttcgacatcgccgtgctccggctcaagacccccatcaccttccgcatgaacgtggcgcctgcctgcctccccgagcgtgactgggccgagtccacgctgatgacgcagaagacggggattgtgagcggcttcgggcgcacccacgagaagggccggcagtccaccaggctcaagatgctggaggtgccctacgtggaccgcaacagctgcaagctgtccagcagcttcatcatcacccagaacatgttctgtgccggctacgacaccaagcaggaggatgcctgccagggggacagcgggggcccgcacgtcacccgcttcaaggacacctacttcgtgacaggcatcgtcagctggggagagggctgtgcccgtaaggggaagtacgggatctacaccaaggtcaccgccttcctcaagtggatcgacaggtccatgaaaaccaggggcttgcccaaggccaagagccatgccccggaggtcataacgtcctctccattaaagtgagatcccactc

SEQ ID NO: 177 - protein, 488 aa, Homo sapiens
  coagulation factor Xa
MGRPLHLVLLSASLAGLLLLGESLFIRREQANNILARVTRANSFLEEMKKGHLERECMEETCSYEEAREVFEDSDKTNEFWNKYKDGDQCETSPCQNQGKCKDGLGEYTCTCLEGFEGKNCELFTRKLCSLDNGDCDQFCHEEQNSVVCSCARGYTLADNGKACIPTGPYPCGKQTLERRKRSVAQATSSSGEAPDSITWKPYDAADLDPTENPFDLLDFNQTQPERGDNNLTRIVGGQECKDGECPWQALLINEENEGFCGGTILSEFYILTAAHCLYQAKRFKVRVGDRNTEQEEGGEAVHEVEVVIKHNRFTKETYDFDIAVLRLKTPITFRMNVAPACLPERDWAESTLMTQKTGIVSGFGRTHEKGRQSTRLKMLEVPYVDRNSCKLSSSFIITQNMFCAGYDTKQEDACQGDSGGPHVTRFKDTYFVTGIVSWGEGCARKGKYGIYTKVTAFLKWIDRSMKTRGLPKAKSHAPEVITSSPLK

SEQ ID NO: 178 - DNA, 1997 bp, Homo sapiens
  Thrombin
aattcctcagtgacccaggagctgacacactatggcgcacgtccgaggcttgcagctgcctggctgcctggccctggctgccctgtgtagccttgtgcacagccagcatgtgttcctggctcctcagcaagcacggtcgctgctccagcgggtccggcgagccaacaccttcttggaggaggtgcgcaagggcaacctagagcgagagtgcgtggaggagacgtgcagctacgaggaggccttcgaggctctggagtcctccacggctacggatgtgttctgggccaagtacacagcttgtgagacagcgaggacgcctcgagataagcttgctgcatgtctggaaggtaactgtgctgagggtctgggtacgaactaccgagggcatgtgaacatcacccggtcaggcattgagtgccagctatggaggagtcgctacccacataagcctgaaatcaactccactacccatcctggggccgacctacaggagaatttctgccgcaaccccgacagcagcaccacgggaccctggtgctacactacagaccccaccgtgaggaggcaggaatgcagcatccctgtctgtggccaggatcaagtcactgtagcgatgactccacgctccgaaggctccagtgtgaatctgtcacctccattggagcagtgtgtccctgatcgggggcagcagtaccaggggcgcctggcggtgaccacacatgggctcccctgcctggcctgggccagcgcacaggccaaggccctgagcaagcaccaggacttcaactcagctgtgcagctggtggagaacttctgccgcaacccagacggggatgaggagggcgtgtggtgctatgtggccgggaagcctggcgactttgggtactgcgacctcaactattgtgaggaggccgtggaggaggagacaggagatgggctggatgaggactcagacagggccatcgaagggcgtaccgccaccagtgagtaccagactttcttcaatccgaggacctttggctcgggagaggcagactgtgggctgcgacctctgttcgagaagaagtcgctggaggacaaaaccgaaagagagctcctggaatcctacatcgacgggcgcattgtggagggctcggatgcagagatcggcatgtcaccttggcaggtgatgcttttccggaagagtccccaggagctgctgtgtggggccagcctcatcagtgaccgctgggtcctcaccgccgcccactgcctcctgtacccgccctgggacaagaacttcaccgagaatgaccttctggtgcgcattggcaagcactcccgcacaaggtacgagcgaaacattgaaaagatatccatgttggaaaagatctacatccaccccaggtacaactggcgggagaacctggaccgggacattgccctgatgaagctgaagaagcctgttgccttcagtgactacattcaccctgtgtgtctgcccgacagggagacggcagccagcttgctccaggctggatacaaggggcgggtgacaggctggggcaacctgaaggagacgtggacagccaacgttggtaaggggcagcccagtgtcctgcaggtggtgaacctgcccattgtggagcggccggtctgcaaggactccacccggatccgcatcactgacaacatgttctgtgctggttacaagcctgatgaagggaaacgaggggatgcctgtgaaggtgacagtgggggaccctttgtcatgaagagcccctttaacaaccgctggtatcaaatgggcatcgtctcatggggtgaaggctgtgaccgggatgggaaatatggcttctacacacatgtgttccgcctgaagaagtggatacagaaggtcattgatcagtttggagagtaggggccactcatattctgggctcctggaaccaatcccgtgaaagaattatttttgtgtttctaaaactatggttcccaataaaagtgactctcagcgg

SEQ ID NO: 179 - protein, 622 aa, Homo sapiens
  Thrombin
MAHVRGLQLPGCLALAALCSLVHSQHVFLAPQQARSLLQRVRRANTFLEEVRKGNLERECVEETCSYEEAFEALESSTATDVFWAKYTACETARTPRDKLAACLEGNCAEGLGTNYRGHVNITRSGIECQLWRSRYPHKPEINSTTHPGADLQENFCRNPDSSTTGPWCYTTDPTVRRQECSIPVCGQDQVTVAMTPRSEGSSVNLSPPLEQCVPDRGQQYQGRLAVTTHGLPCLAWASAQAKALSKHQDFNSAVQLVENFCRNPDGDEEGVWCYVAGKPGDFGYCDLNYCEEAVEEETGDGLDEDSDRAIEGRTATSEYQTFFNPRTFGSGEADCGLRPLFEKKSLEDKTERELLESYIDGRIVEGSDAEIGMSPWQVMLFRKSPQELLCGASLISDRWVLTAAHCLLYPPWDKNFTENDLLVRIGKHSRTRYERNIEKISMLEKIYIHPRYNWRENLDRDIALMKLKKPVAFSDYIHPVCLPDRETAASLLQAGYKGRVTGWGNLKETWTANVGKGQPSVLQVVNLPIVERPVCKDSTRIRITDNMFCAGYKPDEGKRGDACEGDSGGPFVMKSPFNNRWYQMGIVSWGEGCDRDGKYGFYTHVFRLKKWIQKVIDQFGE

SEQ ID NO: 180 - DNA, 1843 bp, Homo sapiens
  protein C (activated)
ctgcaggggggggggggggggggggctgtcatggcggcaggacggcgaacttgcagtatctccacgacccgcccctacaggtgccagtgcctccagaatgtggcagctcacaagcctcctgctgttcgtggccacctggggaatttccggcacaccagctcctcttgactcagtgttctccagcagcgagcgtgcccaccaggtgctgcggatccgcaaacgtgccaactccttcctggaggagctccgtcacagcagcctggagcgggagtgcatagaggagatctgtgacttcgaggaggccaaggaaattttccaaaatgtggatgacacactggccttctggtccaagcacgtcgacggtgaccagtgcttggtcttgcccttggagcacccgtgcgccagcctgtgctgcgggcacggcacgtgcatcgacggcatcggcagcttcagctgcgactgccgcagcggctgggagggccgcttctgccagcgcgaggtgagcttcctcaattgctcgctggacaacggcggctgcacgcattactgcctagaggaggtgggctggcggcgctgtagctgtgcgcctggctacaagctgggggacgacctcctgcagtgtcaccccgcagtgaagttcccttgtgggaggccctggaagcggatggagaagaagcgcagtcacctgaaacgagacacagaagaccaagaagaccaagtagatccgcggctcattgatgggaagatgaccaggcggggagacagcccctggcaggtggtcctgctggactcaaagaagaagctggcctgcggggcagtgctcatccacccctcctgggtgctgacagcggcccactgcatggatgagtccaagaagctccttgtcaggcttggagagtatgacctgcggcgctgggagaagtgggagctggacctggacatcaaggaggtcttcgtccaccccaactacagcaagagcaccaccgacaatgacatcgcactgctgcacctggcccagcccgccaccctctcgcagaccatagtgcccatctgcctcccggacagcggccttgcagagcgcgagctcaatcaggccggccaggagaccctcgtgacgggctggggctaccacagcagccgagagaaggaggccaagagaaaccgcaccttcgtcctcaacttcatcaagattcccgtggtcccgcacaatgagtgcagcgaggtcatgagcaacatggtgtctgagaacatgctgtgtgcgggcatcctcggggaccggcaggatgcctgcgagggcgacagtggggggcccatggtcgcctccttccacggcacctggttcctggtgggcctggtgagctggggtgagggctgtgggctccttcacaactacggcgtttacaccaaagtcagccgctacctcgactggatccatgggcacatcagagacaaggaagccccccagaagagctgggcaccttagcgaccctccctgcagggctgggcttttgcatggcaatggatgggacattaaagggacatgtaacaagcacaccggcctgctgttctgtccttccatccctcttttgggctcttctggagggaagtaacatttactgagcacctgttgtatgtcacatgccttatgaatagaatcttaactcctagagcaactctgtggggtggggaggagcagatccaagttttgcggggtctaaagctgtgtgtgttgagggggatactctgtttatgaaaaagaataaaaaacacaaccacgaaaaaaaaaaaaaaaaaaaaaaaaaaaaaaaaaaaaaaaacccccccccgccccccccccctgcag

SEQ ID NO: 181 - protein, 461 aa, Homo sapiens
  protein C (activated)
MWQLTSLLLFVATWGISGTPAPLDSVFSSSERAHQVLRIRKRANSFLEELRHSSLERECIEEICDFEEAKEIFQNVDDTLAFWSKHVDGDQCLVLPLEHPCASLCCGHGTCIDGIGSFSCDCRSGWEGRFCQREVSFLNCSLDNGGCTHYCLEEVGWRRCSCAPGYKLGDDLLQCHPAVKFPCGRPWKRMEKKRSHLKRDTEDQEDQVDPRLIDGKMTRRGDSPWQVVLLDSKKKLACGAVLIHPSWVLTAAHCMDESKKLLVRLGEYDLRRWEKWELDLDIKEVFVHPNYSKSTTDNDIALLHLAQPATLSQTIVPICLPDSGLAERELNQAGQETLVTGWGYHSSREKEAKRNRTFVLNFIKIPVVPHNECSEVMSNMVSENMLCAGILGDRQDACEGDSGGPMVASFHGTWFLVGLVSWGEGCGLLHNYGVYTKVSRYLDWIHGHIRDKEAPQKSWAP

SEQ ID NO: 182 - DNA, 1388 bp, Homo sapiens
  Acrosin
caggcagtgcaggagtatggttgagatgctaccaactgccattctgctggtcttggcagtgtccgtggttgctaaagataacgccacgtgtgatggcccctgtgggttacggttcaggcaaaacccacagggtggtgtccgcatcgtcggcgggaaggctgcacagcatggggcctggccctggatggtcagcctccagatcttcacgtacaacagccacaggtaccacacatgtggaggcagcttgctgaattcacgatgggtgctcactgctgctcactgcttcgtcggcaaaaataatgtgcatgactggagactggttttcggagcaaaggaaattacatatgggaacaataaaccagtaaaggcgcctgtgcaagagagatatgtggagaaaatcatcattcatgaaaaatacaactctgcgacagagggaaatgacattgccctcgtggagatcacccctcccatttcgtgtgggcgcttcattgggccgggctgcctgccccacttgaaggcaggcctccccagaggctcccagagctgctgggtggccggctggggatatatagaagagaaagcccccaggccatcatctatactgatggaggcacgtgtggatctcatcgacctggacttgtgtaactcgacccagtggtacaatgggcgcgttcagccaaccaatgtgtgcgcggggtatcctgtaggcaagatcgacacctgccagggagacagcggcgggcctctcatgtgcaaagacagcaaggaaagcgcctatgtggtcgtgggaatcacaagctggggggtaggctgtgcccgtgccaagcgccccggaatctacacggccacctggccttatctgaactggatcgcctccaagattggttctaacgctttgcgtatgattcaatcggccacccctccaccgcccaccactcgaccgcccccgattcgaccccccttctcccaccctatctctgctcaccttccttggtatttccaaccgccccctcgaccacttccaccccgaccaccggcagcccagccccgacccccaccttcacccccgcccccacccccacctccagcctcacctttacccccacccccacccccacccccacctacaccctcatctaccacaaaacttccccaaggactttcttttgccaagcgcctacagcagctcatagaggtcttgaaggggaagacctattccgacggaaagaaccattatgacatggagaccacagagctcccagaactgacctcgacctcctgatctgacctggttctcaacagacccagtgagcccttcactcctgagaaaaaggaaagatgaaataaataaataaacatatatatatagatataaaaaaaaaaaaaaa

SEQ ID NO: 183 - protein, 421 aa, Homo sapiens
  Acrosin
MVEMLPTAILLVLAVSVVAKDNATCDGPCGLRFRQNPQGGVRIVGGKAAQHGAWPWMVSLQIFTYNSHRYHTCGGSLLNSRWVLTAAHCFVGKNNVHDWRLVFGAKEITYGNNKPVKAPVQERYVEKIIIHEKYNSATEGNDIALVEITPPISCGRFIGPGCLPHLKAGLPRGSQSCWVAGWGYIEEKAPRPSSILMEARVDLIDLDLCNSTQWYNGRVQPTNVCAGYPVGKIDTCQGDSGGPLMCKDSKESAYVVVGITSWGVGCARAKRPGIYTATWPYLNWIASKIGSNALRMIQSATPPPPTTRPPPIRPPFSHPISAHLPWYFQPPPRPLPPRPPAAQPRPPPSPPPPPPPPASPLPPPPPPPPPTPSSTTKLPQGLSFAKRLQQLIEVLKGKTYSDGKNHYDMETTELPELTSTS

SEQ ID NO: 184 - DNA, 2363 bp, Homo sapiens
  Hepsin transcript variant 1
tcgagcccgctttccagggaccctacctgagggcccacaggtgaggcagcctggcctagcaggccccacgccaccgcctctgcctccaggccgcccgctgctgcggggccaccatgctcctgcccaggcctggagactgacccgaccccggcactacctcgaggctccgcccccacctgctggaccccagggtaaggacaagggcccccagactcacagttccagccctgaggacaggggttccctcatccccccacccagcctaatgcccacctcctaatagaggggttcctggggacctgaagagggggcactatgacgtctccccaagcacctaggtgttctgtcctgctcttccttcagactcagccgttggaccccagtcctttcctccccagacccaggagttccagccctcaggcccctcctccctcatactagggagtcctggcccccaaattcctcctttcccaagacttatgatttcaggtcctcagctgtctcctccctcaaaccgggatcctcagtcccctgctccaccaggctcaggcatgggggtccccatccctgcaaatccaggcgtccccccgctgctggtcagacactgaccccatccttgaacccagcccaatctgcgtccgtgatcacggcgtgctctggccaaggcccagtccctacagcctgcctggatggacgcctgggactgggggcgccaggactgggctgggctgggctcccccaggccctgcctccccgtccatctcctcacaggtcccaccctggcccaggaggtcagccagggaatcattaacaagaggcagtgacatggcgcagaaggagggtggccggactgtgccatgctgctccagacccaaggtggcagctctcactgcggggaccctgctacttctgacagccatcggggcggcatcctgggccattgtggctgttctcctcaggagtgaccaggagccgctgtacccagtgcaggtcagctctgcggacgctcggctcatggtctttgacaagacggaagggacgtggcggctgctgtgctcctcgcgctccaacgccagggtagccggactcagctgcgaggagatgggcttcctcagggcactgacccactccgagctggacgtgcgaacggcgggcgccaatggcacgtcgggcttcttctgtgtggacgaggggaggctgccccacacccagaggctgctggaggtcatctccgtgtgtgattgccccagaggccgtttcttggccgccatctgccaagactgtggccgcaggaagctgcccgtggaccgcatcgtgggaggccgggacaccagcttgggccggtggccgtggcaagtcagccttcgctatgatggagcacacctctgtgggggatccctgctctccggggactgggtgctgacagccgcccactgcttcccggagcggaaccgggtcctgtcccgatggcgagtgtttgccggtgccgtggcccaggcctctccccacggtctgcagctgggggtgcaggctgtggtctaccacgggggctatcttccctttcgggaccccaacagcgaggagaacagcaacgatattgccctggtccacctctccagtcccctgcccctcacagaatacatccagcctgtgtgcctcccagctgccggccaggccctggtggatggcaagatctgtaccgtgacgggctggggcaacacgcagtactatggccaacaggccggggtactccaggaggctcgagtccccataatcagcaatgatgtctgcaatggcgctgacttctatggaaaccagatcaagcccaagatgttctgtgctggctaccccgagggtggcattgatgcctgccagggcgacagcggtggtccctttgtgtgtgaggacagcatctctcggacgccacgttggcggctgtgtggcattgtgagttggggcactggctgtgccctggcccagaagccaggcgtctacaccaaagtcagtgacttccgggagtggatcttccaggccataaagactcactccgaagccagcggcatggtgacccagctctgaccggtggcttctcgctgcgcagcctccagggcccgaggtgatcccggtggtgggatccacgctgggccgaggatgggacgtttttcttcttgggcccggtccacaggtccaaggacaccctccctccagggtcctctcttccacagtggcgggcccactcagccccgagaccacccaacctcaccctcctgacccccatgtaaatattgttctgctgtctgggactcctgtctaggtgcccctgatgatgggatgctctttaaataataaagatggttttgatt

SEQ ID NO: 185 - protein, 417 aa, Homo sapiens
  Hepsin
MAQKEGGRTVPCCSRPKVAALTAGTLLLLTAIGAASWAIVAVLLRSDQEPLYPVQVSSADARLMVFDKTEGTWRLLCSSRSNARVAGLSCEEMGFLRALTHSELDVRTAGANGTSGFFCVDEGRLPHTQRLLEVISVCDCPRGRFLAAICQDCGRRKLPVDRIVGGRDTSLGRWPWQVSLRYDGAHLCGGSLLSGDWVLTAAHCFPERNRVLSRWRVFAGAVAQASPHGLQLGVQAVVYHGGYLPFRDPNSEENSNDIALVHLSSPLPLTEYIQPVCLPAAGQALVDGKICTVTGWGNTQYYGQQAGVLQEARVPIISNDVCNGADFYGNQIKPKMFCAGYPEGGIDACQGDSGGPFVCEDSISRTPRWRLCGIVSWGTGCALAQKPGVYTKVSDFREWIFQAIKTHSEASGMVTQL

SEQ ID NO: 186 - DNA, 1783 bp, Homo sapiens
  Hepsin transcript variant 2
tcgagcccgctttccagggaccctacctgagggcccacaggtgaggcagcctggcctagcaggccccacgccaccgcctctgcctccaggccgcccgctgctgcggggccaccatgctcctgcccaggcctggagactgacccgaccccggcactacctcgaggctccgcccccacctgctggaccccagggtcccaccctggcccaggaggtcagccagggaatcattaacaagaggcagtgacatggcgcagaaggagggtggccggactgtgccatgctgctccagacccaaggtggcagctctcactgcggggaccctgctacttctgacagccatcggggcggcatcctgggccattgtggctgttctcctcaggagtgaccaggagccgctgtacccagtgcaggtcagctctgcggacgctcggctcatggtctttgacaagacggaagggacgtggcggctgctgtgctcctcgcgctccaacgccagggtagccggactcagctgcgaggagatgggcttcctcagggcactgacccactccgagctggacgtgcgaacggcgggcgccaatggcacgtcgggcttcttctgtgtggacgaggggaggctgccccacacccagaggctgctggaggtcatctccgtgtgtgattgccccagaggccgtttcttggccgccatctgccaagactgtggccgcaggaagctgcccgtggaccgcatcgtgggaggccgggacaccagcttgggccggtggccgtggcaagtcagccttcgctatgatggagcacacctctgtgggggatccctgctctccggggactgggtgctgacagccgcccactgcttcccggagcggaaccgggtcctgtcccgatggcgagtgtttgccggtgccgtggcccaggcctctccccacggtctgcagctgggggtgcaggctgtggtctaccacgggggctatcttccctttcgggaccccaacagcgaggagaacagcaacgatattgccctggtccacctctccagtcccctgcccctcacagaatacatccagcctgtgtgcctcccagctgccggccaggccctggtggatggcaagatctgtaccgtgacgggctggggcaacacgcagtactatggccaacaggccggggtactccaggaggctcgagtccccataatcagcaatgatgtctgcaatggcgctgacttctatggaaaccagatcaagcccaagatgttctgtgctggctaccccgagggtggcattgatgcctgccagggcgacagcggtggtccctttgtgtgtgaggacagcatctctcggacgccacgttggcggctgtgtggcattgtgagttggggcactggctgtgccctggcccagaagccaggcgtctacaccaaagtcagtgacttccgggagtggatcttccaggccataaagactcactccgaagccagcggcatggtgacccagctctgaccggtggcttctcgctgcgcagcctccagggcccgaggtgatcccggtggtgggatccacgctgggccgaggatgggacgtttttcttcttgggcccggtccacaggtccaaggacaccctccctccagggtcctctcttccacagtggcgggcccactcagccccgagaccacccaacctcaccctcctgacccccatgtaaatattgttctgctgtctgggactcctgtctaggtgcccctgatgatgggatgctctttaaataataaagatggttttgatt

SEQ ID NO: 187 - protein, 417 aa, Homo sapiens; identical to SEQ ID NO: 185
  Hepsin

SEQ ID NO: 188 - DNA, 2038 bp, Homo sapiens
  hepatocyte growth factor activator
gccatggggcgctgggcctgggtccccagcccctggcccccaccggggctgggccccttcctcctcctcctcctgctgctgctgctgctgccacgggggttccagccccagcctggcgggaaccgtacggagtccccagaacctaatgccacagcgacccctgcgatccccactatcctggtgacctctgtgacctctgagaccccagcaacaagtgctccagaggcagagggaccccaaagtggggggctcccgcccccgcccagggcagttccctcgagcagtagcccccaggcccaagcactcaccgaggacgggaggccctgcaggttccccttccgctacgggggccgcatgctgcatgcctgcacttcggagggcagtgcacacaggaagtggtgtgccacaactcacaactacgaccgggacagggcctggggctactgtgtggaggccaccccgcctccagggggcccagctgccctggatccctgtgcctccggcccctgcctcaatggaggctcctgctccaatacccaggacccccagtcctatcactgcagctgcccccgggccttcaccggcaaggactgcggcacagagaaatgctttgatgagacccgctacgagtacctggaggggggcgaccgctgggcccgcgtgcgccagggccacgtggaacagtgcgagtgcttcgggggccggacctggtgcgaaggcacccgacatacagcttgtctgagcagcccttgcctgaacgggggcacctgccacctgatcgtggccaccgggaccaccgtgtgtgcctgcccaccaggcttcgctggacggctctgcaacatcgagcctgatgagcgctgcttcttggggaacggcactgggtaccgtggcgtggccagcacctcagcctcgggcctcagctgcctggcctggaactccgatctgctctaccaggagctgcacgtggactccgtgggcgccgcggccctgctgggcctgggcccccatgcctactgccggaatccggacaatgacgagaggccctggtgctacgtggtgaaggacagcgcgctctcctgggagtactgccgcctggaggcctgcgaatccctcaccagagtccaactgtcaccggatctcctggcgaccctgcctgagccagcctccccggggcgccaggcctgcggcaggaggcacaagaagaggacgttcctgcggccacgtatcatcggcggctcctcctcgctgcccggctcgcacccctggctggccgccatctacatcggggacagcttctgcgccgggagcctggtccacacctgctgggtggtgtcggccgcccactgcttctcccacagcccccccagggacagcgtctccgtggtgctgggccagcacttcttcaaccgcacgacggacgtgacgcagaccttcggcatcgagaagtacatcccgtacaccctgtactcggtgttcaaccccagcgaccacgacctcgtcctgatccggctgaagaagaaaggggaccgctgtgccacacgctcgcagttcgtgcagcccatctgcctgcccgagcccggcagcaccttccccgcaggacacaagtgccagattgcgggctggggccacttggatgagaacgtgagcggctactccagctccctgcgggaggccctggtccccctggtcgccgaccacaagtgcagcagccctgaggtctacggcgccgacatcagccccaacatgctctgtgccggctacttcgactgcaagtccgacgcctgccagggggactcaggggggcccctggcctgcgagaagaacggcgtggcttacctctacggcatcatcagctggggtgacggctgcgggcggctccacaagccgggggtctacacccgcgtggccaactatgtggactggatcaacgaccggatacggcctcccaggcggcttgtggctccctcctgaccctccagcgggacaccctggttcccaccattccctgccttgctgacaataaagatatttccaagaa

SEQ ID NO: 189 - protein, 655 aa, Homo sapiens
  hepatocyte growth factor activator
MGRWAWVPSPWPPPGLGPFLLLLLLLLLLPRGFQPQPGGNRTESPEPNATATPAIPTILVTSVTSETPATSAPEAEGPQSGGLPPPPRAVPSSSSPQAQALTEDGRPCRFPFRYGGRMLHACTSEGSAHRKWCATTHNYDRDRAWGYCVEATPPPGGPAALDPCASGPCLNGGSCSNTQDPQSYHCSCPRAFTGKDCGTEKCFDETRYEYLEGGDRWARVRQGHVEQCECFGGRTWCEGTRHTACLSSPCLNGGTCHLIVATGTTVCACPPGFAGRLCNIEPDERCFLGNGTGYRGVASTSASGLSCLAWNSDLLYQELHVDSVGAAALLGLGPHAYCRNPDNDERPWCYVVKDSALSWEYCRLEACESLTRVQLSPDLLATLPEPASPGRQACGRRHKKRTFLRPRIIGGSSSLPGSHPWLAAIYIGDSFCAGSLVHTCWVVSAAHCFSHSPPRDSVSVVLGQHFFNRTTDVTQTFGIEKYIPYTLYSVFNPSDHDLVLIRLKKKGDRCATRSQFVQPICLPEPGSTFPAGHKCQIAGWGHLDENVSGYSSSLREALVPLVADHKCSSPEVYGADISPNMLCAGYFDCKSDACQGDSGGPLACEKNGVAYLYGIISWGDGCGRLHKPGVYTRVANYVDWINDRIRPPRRLVAPS

SEQ ID NO: 190 - DNA, 2360 bp, Homo sapiens
  u-plasminogen activator (uPA)
acagtgcggagaccgcagccccggagcccgggccagggtccacctgtccccgcagcgccggctcgcgccctcctgccgcagccaccgagccgccgtctagcgccccgacctcgccaccatgagagccctgctggcgcgcctgcttctctgcgtcctggtcgtgagcgactccaaaggcagcaatgaacttcatcaagttccatcgaactgtgactgtctaaatggaggaacatgtgtgtccaacaagtacttctccaacattcactggtgcaactgcccaaagaaattcggagggcagcactgtgaaatagataagtcaaaaacctgctatgaggggaatggtcacttttaccgaggaaaggccagcactgacaccatgggccggccctgcctgccctggaactctgccactgtccttcagcaaacgtaccatgcccacagatctgatgctcttcagctgggcctggggaaacataattactgcaggaacccagacaaccggaggcgaccctggtgctatgtgcaggtgggcctaaagccgcttgtccaagagtgcatggtgcatgactgcgcagatggaaaaaagccctcctctcctccagaagaattaaaatttcagtgtggccaaaagactctgaggccccgctttaagattattgggggagaattcaccaccatcgagaaccagccctggtttgcggccatctacaggaggcaccgggggggctctgtcacctacgtgtgtggaggcagcctcatcagcccttgctgggtgatcagcgccacacactgcttcattgattacccaaagaaggaggactacatcgtctacctgggtcgctcaaggcttaactccaacacgcaaggggagatgaagtttgaggtggaaaacctcatcctacacaaggactacagcgctgacacgcttgctcaccacaacgacattgccttgctgaagatccgttccaaggagggcaggtgtgcgcagccatcccggactatacagaccatctgcctgccctcgatgtataacgatccccagtttggcacaagctgtgagatcactggctttggaaaagagaattctaccgactatctctatccggagcagctgaaaatgactgttgtgaagctgatttcccaccgggagtgtcagcagccccactactacggctctgaagtcaccaccaaaatgctgtgtgctgctgacccacagtggaaaacagattcctgccagggagactcagggggacccctcgtctgttccctccaaggccgcatgactttgactggaattgtgagctggggccgtggatgtgccctgaaggacaagccaggcgtctacacgagagtctcacacttcttaccctggatccgcagtcacaccaaggaagagaatggcctggccctctgagggtccccagggaggaaacgggcaccacccgctttcttgctggttgtcatttttgcagtagagtcatctccatcagctgtaagaagagactgggaagataggctctgcacagatggatttgcctgtgccacccaccagggcgaacgacaatagctttaccctcaggcataggcctgggtgctggctgcccagacccctctggccaggatggaggggtggtcctgactcaacatgttactgaccagcaacttgtctttttctggactgaagcctgcaggagttaaaaagggcagggcatctcctgtgcatgggtgaagggagagccagctcccccgacggtgggcatttgtgaggcccatggttgagaaatgaataatttcccaattaggaagtgtaacagctgaggtctcttgagggagcttagccaatgtgggagcagcggtttggggagcagagacactaacgacttcagggcagggctctgatattccatgaatgtatcaggaaatatatatgtgtgtgtatgtttgcacacttgtgtgtgggctgtgagtgtaagtgtgagtaagagctggtgtctgattgttaagtctaaatatttccttaaactgtgtggactgtgatgccacacagagtggtctttctggagaggttataggtcactcctggggcctcttgggtcccccacgtgacagtgcctgggaatgtattattctgcagcatgacctgtgaccagcactgtctcagtttcactttcacatagatgtccctttcttggccagttatcccttccttttagcctagttcatccaatcctcactgggtggggtgaggaccactcctgtacactgaatatttatatttcactatttttatttatatttttgtaattttaaataaaagtgatcaataaaatgtgatttttctgatgaaaaaaaaaaaaaaa

SEQ ID NO: 191 - protein, 431 aa, Homo sapiens
  u-plasminogen activator (uPA)
MRALLARLLLCVLVVSDSKGSNELHQVPSNCDCLNGGTCVSNKYFSNIHWCNCPKKFGGQHCEIDKSKTCYEGNGHFYRGKASTDTMGRPCLPWNSATVLQQTYHAHRSDALQLGLGKHNYCRNPDNRRRPWCYVQVGLKPLVQECMVHDCADGKKPSSPPEELKFQCGQKTLRPRFKIIGGEFTTIENQPWFAAIYRRHRGGSVTYVCGGSLISPCWVISATHCFIDYPKKEDYIVYLGRSRLNSNTQGEMKFEVENLILHKDYSADTLAHHNDIALLKIRSKEGRCAQPSRTIQTICLPSMYNDPQFGTSCEITGFGKENSTDYLYPEQLKMTVVKLISHRECQQPHYYGSEVTTKMLCAADPQWKTDSCQGDSGGPLVCSLQGRMTLTGIVSWGRGCALKDKPGVYTRVSHFLPWIRSHTKEENGLAL

SEQ ID NO: 192 - DNA, 2653 bp, Homo sapiens
  t-plasminogen activator (tPA) transcript variant 1
atggccctgtccactgagcatcctcccgccacacagaaacccgcccagccggggccaccgaccccaccccctgcctggaaacttaaggaggccggagctgtggggagctcagagctgagatcctacaggagtccagggctggagagaaaacctctgcgaggaaagggaaggagcaagccgtgaatttaagggacgctgtgaagcaatcatggatgcaatgaagagagggctctgctgtgtgctgctgctgtgtggagcagtcttcgtttcgcccagccaggaaatccatgcccgattcagaagaggagccagatcttaccaagtgatctgcagagatgaaaaaacgcagatgatataccagcaacatcagtcatggctgcgccctgtgctcagaagcaaccgggtggaatattgctggtgcaacagtggcagggcacagtgccactcagtgcctgtcaaaagttgcagcgagccaaggtgtttcaacgggggcacctgccagcaggccctgtacttctcagatttcgtgtgccagtgccccgaaggatttgctgggaagtgctgtgaaatagataccagggccacgtgctacgaggaccagggcatcagctacaggggcacgtggagcacagcggagagtggcgccgagtgcaccaactggaacagcagcgcgttggcccagaagccctacagcgggcggaggccagacgccatcaggctgggcctggggaaccacaactactgcagaaacccagatcgagactcaaagccctggtgctacgtctttaaggcggggaagtacagctcagagttctgcagcacccctgcctgctctgagggaaacagtgactgctactttgggaatgggtcagcctaccgtggcacgcacagcctcaccgagtcgggtgcctcctgcctcccgtggaattccatgatcctgataggcaaggtttacacagcacagaaccccagtgcccaggcactgggcctgggcaaacataattactgccggaatcctgatggggatgccaagccctggtgccacgtgctgaagaaccgcaggctgacgtgggagtactgtgatgtgccctcctgctccacctgcggcctgagacagtacagccagcctcagtttcgcatcaaaggagggctcttcgccgacatcgcctcccacccctggcaggctgccatctttgccaagcacaggaggtcgcccggagagcggttcctgtgcgggggcatactcatcagctcctgctggattctctctgccgcccactgcttccaggagaggtttccgccccaccacctgacggtgatcttgggcagaacataccgggtggtccctggcgaggaggagcagaaatttgaagtcgaaaaatacattgtccataaggaattcgatgatgacacttacgacaatgacattgcgctgctgcagctgaaatcggattcgtcccgctgtgcccaggagagcagcgtggtccgcactgtgtgccttcccccggcggacctgcagctgccggactggacggagtgtgagctctccggctacggcaagcatgaggccttgtctcctttctattcggagcggctgaaggaggctcatgtcagactgtacccatccagccgctgcacatcacaacatttacttaacagaacagtcaccgacaacatgctgtgtgctggagacactcggagcggcgggccccaggcaaacttgcacgacgcctgccagggcgattcgggaggccccctggtgtgtctgaacgatggccgcatgactttggtgggcatcatcagctggggcctgggctgtggacagaaggatgtcccgggtgtgtacaccaaggttaccaactacctagactggattcgtgacaacatgcgaccgtgaccaggaacacccgactcctcaaaagcaaatgagatcccgcctcttcttcttcagaagacactgcaaaggcgcagtgcttctctacagacttctccagacccaccacaccgcagaagcgggacgagaccctacaggagagggaagagtgcattttcccagatacttcccattttggaagttttcaggacttggtctgatttcaggatactctgtcagatgggaagacatgaatgcacactagcctctccaggaatgcctcctccctgggcagaaagtggccatgccaccctgttttcagctaaagcccaacctcctgacctgtcaccgtgagcagctttggaaacaggaccacaaaaatgaaagcatgtctcaatagtaaaagataacaagatctttcaggaaagacggattgcattagaaatagacagtatatttatagtcacaagagcccagcagggcctcaaagttggggcaggctggctggcccgtcatgttcctcaaaagcacccttgacgtcaagtctccttcccctttccccactccctggctctcagaaggtattccttttgtgtacagtgtgtaaagtgtaaatcctttttctttataaactttagagtagcatgagagaattgtatcatttgaacaactaggcttcagcatatttatagcaatccatgttagtttttactttctgttgccacaaccctgttttatactgtacttaataaattcagatatatttttcacagtttttcc

SEQ ID NO: 193 - protein, 562 aa, Homo sapiens
  t-plasminogen activator (tPA) isoform 1
MDAMKRGLCCVLLLCGAVFVSPSQEIHARFRRGARSYQVICRDEKTQMIYQQHQSWLRPVLRSNRVEYCWCNSGRAQCHSVPVKSCSEPRCFNGGTCQQALYFSDFVCQCPEGFAGKCCEIDTRATCYEDQGISYRGTWSTAESGAECTNWNSSALAQKPYSGRRPDAIRLGLGNHNYCRNPDRDSKPWCYVFKAGKYSSEFCSTPACSEGNSDCYFGNGSAYRGTHSLTESGASCLPWNSMILIGKVYTAQNPSAQALGLGKHNYCRNPDGDAKPWCHVLKNRRLTWEYCDVPSCSTCGLRQYSQPQFRIKGGLFADIASHPWQAAIFAKHRRSPGERFLCGGILISSCWILSAAHCFQERFPPHHLTVILGRTYRVVPGEEEQKFEVEKYIVHKEFDDDTYDNDIALLQLKSDSSRCAQESSVVRTVCLPPADLQLPDWTECELSGYGKHEALSPFYSERLKEAHVRLYPSSRCTSQHLLNRTVTDNMLCAGDTRSGGPQANLHDACQGDSGGPLVCLNDGRMTLVGIISWGLGCGQKDVPGVYTKVTNYLDWIRDNMRP

SEQ ID NO: 194 - DNA, 2160 bp, Homo sapiens
  t-plasminogen activator (tPA) transcript variant 2
atggccctgtccactgagcatcctcccgccacacagaaacccgcccagccggggccaccgaccccaccccctgcctggaaacttaaggaggccggagctgtggggagctcagagctgagatcctacaggagtccagggctggagagaaaacctctgcgaggaaagggaaggagcaagccgtgaatttaagggacgctgtgaagcaatcatggatgcaatgaagagagggctctgctgtgtgctgctgctgtgtggagcagtcttcgtttcgcccagccaggaaatccatgcccgattcagaagaggagccagatcttaccaagtgatctgcagagatgaaaaaacgcagatgatataccagcaacatcagtcatggctgcgccctgtgctcagaagcaaccgggtggaatattgctggtgcaacagtggcagggcacagtgccactcagtgcctgtcaaaagttgcagcgagccaaggtgtttcaacgggggcacctgccagcaggccctgtacttctcagatttcgtgtgccagtgccccgaaggatttgctgggaagtgctgtgaaatagataccagggccacgtgctacgaggaccagggcatcagctacaggggcacgtggagcacagcggagagtggcgccgagtgcaccaactggaacagcagcgcgttggcccagaagccctacagcgggcggaggccagacgccatcaggctgggcctggggaaccacaactactgcagaaacccagatcgagactcaaagccctggtgctacgtctttaaggcggggaagtacagctcagagttctgcagcacccctgcctgctctgagggaaacagtgactgctactttgggaatgggtcagcctaccgtggcacgcacagcctcaccgagtcgggtgcctcctgcctcccgtggaattccatgatcctgataggcaaggtttacacagcacagaaccccagtgcccaggcactgggcctgggcaaacataattactgccggactggacggagtgtgagctctccggctacggcaagcatgaggccttgtctcctttctattcggagcggctgaaggaggctcatgtcagactgtacccatccagccgctgcacatcacaacatttacttaacagaacagtcaccgacaacatgctgtgtgctggagacactcggagcggcgggccccaggcaaacttgcacgacgcctgccagggcgattcgggaggccccctggtgtgtctgaacgatggccgcatgactttggtgggcatcatcagctggggcctgggctgtggacagaaggatgtcccgggtgtgtacaccaaggttaccaactacctagactggattcgtgacaacatgcgaccgtgaccaggaacacccgactcctcaaaagcaaatgagatcccgcctcttcttcttcagaagacactgcaaaggcgcagtgcttctctacagacttctccagacccaccacaccgcagaagcgggacgagaccctacaggagagggaagagtgcattttcccagatacttcccattttggaagttttcaggacttggtctgatttcaggatactctgtcagatgggaagacatgaatgcacactagcctctccaggaatgcctcctccctgggcagaaagtggccatgccaccctgttttcagctaaagcccaacctcctgacctgtcaccgtgagcagctttggaaacaggaccacaaaaatgaaagcatgtctcaatagtaaaagataacaagatctttcaggaaagacggattgcattagaaatagacagtatatttatagtcacaagagcccagcagggcctcaaagttggggcaggctggctggcccgtcatgttcctcaaaagcacccttgacgtcaagtctccttcccctttccccactccctggctctcagaaggtattccttttgtgtacagtgtgtaaagtgtaaatcctttttctttataaactttagagtagcatgagagaattgtatcatttgaacaactaggcttcagcatatttatagcaatccatgttagtttttactttctgttgccacaaccctgttttatactgtacttaataaattcagatatatttttcacagtttttccaaaaaaaaaaaaaaaaaaaaa

SEQ ID NO: 195 - protein, 291 aa, Homo sapiens
  t-plasminogen activator (tPA) isoform 2
MDAMKRGLCCVLLLCGAVFVSPSQEIHARFRRGARSYQVICRDEKTQMIYQQHQSWLRPVLRSNRVEYCWCNSGRAQCHSVPVKSCSEPRCFNGGTCQQALYFSDFVCQCPEGFAGKCCEIDTRATCYEDQGISYRGTWSTAESGAECTNWNSSALAQKPYSGRRPDAIRLGLGNHNYCRNPDRDSKPWCYVFKAGKYSSEFCSTPACSEGNSDCYFGNGSAYRGTHSLTESGASCLPWNSMILIGKVYTAQNPSAQALGLGKHNYCRTGRSVSSPATASMRPCLLSIRSG

SEQ ID NO: 196 - DNA, 2534 bp, Homo sapiens
  t-plasminogen activator (tPA) transcript variant 3
atggccctgtccactgagcatcctcccgccacacagaaacccgcccagccggggccaccgaccccaccccctgcctggaaacttaaggaggccggagctgtggggagctcagagctgagatcctacaggagtccagggctggagagaaaacctctgcgaggaaagggaaggagcaagccgtgaatttaagggacgctgtgaagcaatcatggatgcaatgaagagagggctctgctgtgtgctgctgctgtgtggagcagtcttcgtttcgcccagccaggaaatccatgcccgattcagaagaggagccagatcttaccaaggttgcagcgagccaaggtgtttcaacgggggcacctgccagcaggccctgtacttctcagatttcgtgtgccagtgccccgaaggatttgctgggaagtgctgtgaaatagataccagggccacgtgctacgaggaccagggcatcagctacaggggcacgtggagcacagcggagagtggcgccgagtgcaccaactggaacagcagcgcgttggcccagaagccctacagcgggcggaggccagacgccatcaggctgggcctggggaaccacaactactgcagaaacccagatcgagactcaaagccctggtgctacgtctttaaggcggggaagtacagctcagagttctgcagcacccctgcctgctctgagggaaacagtgactgctactttgggaatgggtcagcctaccgtggcacgcacagcctcaccgagtcgggtgcctcctgcctcccgtggaattccatgatcctgataggcaaggtttacacagcacagaaccccagtgcccaggcactgggcctgggcaaacataattactgccggaatcctgatggggatgccaagccctggtgccacgtgctgaagaaccgcaggctgacgtgggagtactgtgatgtgccctcctgctccacctgcggcctgagacagtacagccagcctcagtttcgcatcaaaggagggctcttcgccgacatcgcctcccacccctggcaggctgccatctttgccaagcacaggaggtcgcccggagagcggttcctgtgcgggggcatactcatcagctcctgctggattctctctgccgcccactgcttccaggagaggtttccgccccaccacctgacggtgatcttgggcagaacataccgggtggtccctggcgaggaggagcagaaatttgaagtcgaaaaatacattgtccataaggaattcgatgatgacacttacgacaatgacattgcgctgctgcagctgaaatcggattcgtcccgctgtgcccaggagagcagcgtggtccgcactgtgtgccttcccccggcggacctgcagctgccggactggacggagtgtgagctctccggctacggcaagcatgaggccttgtctcctttctattcggagcggctgaaggaggctcatgtcagactgtacccatccagccgctgcacatcacaacatttacttaacagaacagtcaccgacaacatgctgtgtgctggagacactcggagcggcgggccccaggcaaacttgcacgacgcctgccagggcgattcgggaggccccctggtgtgtctgaacgatggccgcatgactttggtgggcatcatcagctggggcctgggctgtggacagaaggatgtcccgggtgtgtacaccaaggttaccaactacctagactggattcgtgacaacatgcgaccgtgaccaggaacacccgactcctcaaaagcaaatgagatcccgcctcttcttcttcagaagacactgcaaaggcgcagtgcttctctacagacttctccagacccaccacaccgcagaagcgggacgagaccctacaggagagggaagagtgcattttcccagatacttcccattttggaagttttcaggacttggtctgatttcaggatactctgtcagatgggaagacatgaatgcacactagcctctccaggaatgcctcctccctgggcagaaagtggccatgccaccctgttttcagctaaagcccaacctcctgacctgtcaccgtgagcagctttggaaacaggaccacaaaaatgaaagcatgtctcaatagtaaaagataacaagatctttcaggaaagacggattgcattagaaatagacagtatatttatagtcacaagagcccagcagggcctcaaagttggggcaggctggctggcccgtcatgttcctcaaaagcacccttgacgtcaagtctccttcccctttccccactccctggctctcagaaggtattccttttgtgtacagtgtgtaaagtgtaaatcctttttctttataaactttagagtagcatgagagaattgtatcatttgaacaactaggcttcagcatatttatagcaatccatgttagtttttactttctgttgccacaaccctgttttatactgtacttaataaattcagatatatttttcacagtttttccaaaaaaaaaaaaaaaaaaa

SEQ ID NO: 197 - protein, 516 aa, Homo sapiens
  t-plasminogen activator (tPA) isoform 3
MDAMKRGLCCVLLLCGAVFVSPSQEIHARFRRGARSYQGCSEPRCFNGGTCQQALYFSDFVCQCPEGFAGKCCEIDTRATCYEDQGISYRGTWSTAESGAECTNWNSSALAQKPYSGRRPDAIRLGLGNHNYCRNPDRDSKPWCYVFKAGKYSSEFCSTPACSEGNSDCYFGNGSAYRGTHSLTESGASCLPWNSMILIGKVYTAQNPSAQALGLGKHNYCRNPDGDAKPWCHVLKNRRLTWEYCDVPSCSTCGLRQYSQPQFRIKGGLFADIASHPWQAAIFAKHRRSPGERFLCGGILISSCWILSAAHCFQERFPPHHLTVILGRTYRVVPGEEEQKFEVEKYIVHKEFDDDTYDNDIALLQLKSDSSRCAQESSVVRTVCLPPADLQLPDWTECELSGYGKHEALSPFYSERLKEAHVRLYPSSRCTSQHLLNRTVTDNMLCAGDTRSGGPQANLHDACQGDSGGPLVCLNDGRMTLVGIISWGLGCGQKDVPGVYTKVTNYLDWIRDNMRP

SEQ ID NO: 198 - DNA, 2732 bp, Homo sapiens
  Plasmin
aacaacatcctgggattgggacccactttctgggcactgctggccagtcccaaaatggaacataaggaagtggttcttctacttcttttatttctgaaatcaggtcaaggagagcctctggatgactatgtgaatacccagggggcttcactgttcagtgtcactaagaagcagctgggagcaggaagtatagaagaatgtgcagcaaaatgtgaggaggacgaagaattcacctgcagggcattccaatatcacagtaaagagcaacaatgtgtgataatggctgaaaacaggaagtcctccataatcattaggatgagagatgtagttttatttgaaaagaaagtgtatctctcagagtgcaagactgggaatggaaagaactacagagggacgatgtccaaaacaaaaaatggcatcacctgtcaaaaatggagttccacttctccccacagacctagattctcacctgctacacacccctcagagggactggaggagaactactgcaggaatccagacaacgatccgcaggggccctggtgctatactactgatccagaaaagagatatgactactgcgacattcttgagtgtgaagaggaatgtatgcattgcagtggagaaaactatgacggcaaaatttccaagaccatgtctggactggaatgccaggcctgggactctcagagcccacacgctcatggatacattccttccaaatttccaaacaagaacctgaagaagaattactgtcgtaaccccgatagggagctgcggccttggtgtttcaccaccgaccccaacaagcgctgggaactttgcgacatcccccgctgcacaacacctccaccatcttctggtcccacctaccagtgtctgaagggaacaggtgaaaactatcgcgggaatgtggctgttaccgtttccgggcacacctgtcagcactggagtgcacagacccctcacacacataacaggacaccagaaaacttcccctgcaaaaatttggatgaaaactactgccgcaatcctgacggaaaaagggccccatggtgccatacaaccaacagccaagtgcggtgggagtactgtaagataccgtcctgtgactcctccccagtatccacggaacaattggctcccacagcaccacctgagctaacccctgtggtccaggactgctaccatggtgatggacagagctaccgaggcacatcctccaccaccaccacaggaaagaagtgtcagtcttggtcatctatgacaccacaccggcaccagaagaccccagaaaactacccaaatgctggcctgacaatgaactactgcaggaatccagatgccgataaaggcccctggtgttttaccacagaccccagcgtcaggtgggagtactgcaacctgaaaaaatgctcaggaacagaagcgagtgttgtagcacctccgcctgttgtcctgcttccagatgtagagactccttccgaagaagactgtatgtttgggaatgggaaaggataccgaggcaagagggcgaccactgttactgggacgccatgccaggactgggctgcccaggagccccatagacacagcattttcactccagagacaaatccacgggcgggtctggaaaaaaattactgccgtaaccctgatggtgatgtaggtggtccctggtgctacacgacaaatccaagaaaactttacgactactgtgatgtccctcagtgtgcggccccttcatttgattgtgggaagcctcaagtggagccgaagaaatgtcctggaagggttgtgggggggtgtgtggcccacccacattcctggccctggcaagtcagtcttagaacaaggtttggaatgcacttctgtggaggcaccttgatatccccagagtgggtgttgactgctgcccactgcttggagaagtccccaaggccttcatcctacaaggtcatcctgggtgcacaccaagaagtgaatctcgaaccgcatgttcaggaaatagaagtgtctaggctgttcttggagcccacacgaaaagatattgccttgctaaagctaagcagtcctgccgtcatcactgacaaagtaatcccagcttgtctgccatccccaaattatgtggtcgctgaccggaccgaatgtttcatcactggctggggagaaacccaaggtacttttggagctggccttctcaaggaagcccagctccctgtgattgagaataaagtgtgcaatcgctatgagtttctgaatggaagagtccaatccaccgaactctgtgctgggcatttggccggaggcactgacagttgccagggtgacagtggaggtcctctggtttgcttcgagaaggacaaatacattttacaaggagtcacttcttggggtcttggctgtgcacgccccaataagcctggtgtctatgttcgtgtttcaaggtttgttacttggattgagggagtgatgagaaataattaattggacgggagacagagtgacgcactgactcacctagaggctgggacgtgggtagggatttagcatgctggaaataactggcagtaatcaaacgaagacactgtccccagctaccagctacgccaaacctcggcattttttgtgttattttctgactgctggattctgtagtaaggtgacatagctatgacatttgttaaaaataaactctgtacttaactttgatttgagtaaattttggtttt

SEQ ID NO: 199 - protein, 810 aa, Homo sapiens
  Plasmin
MEHKEVVLLLLLFLKSGQGEPLDDYVNTQGASLFSVTKKQLGAGSIEECAAKCEEDEEFTCRAFQYHSKEQQCVIMAENRKSSIIIRMRDVVLFEKKVYLSECKTGNGKNYRGTMSKTKNGITCQKWSSTSPHRPRFSPATHPSEGLEENYCRNPDNDPQGPWCYTTDPEKRYDYCDILECEEECMHCSGENYDGKISKTMSGLECQAWDSQSPHAHGYIPSKFPNKNLKKNYCRNPDRELRPWCFTTDPNKRWELCDIPRCTTPPPSSGPTYQCLKGTGENYRGNVAVTVSGHTCQHWSAQTPHTHNRTPENFPCKNLDENYCRNPDGKRAPWCHTTNSQVRWEYCKIPSCDSSPVSTEQLAPTAPPELTPVVQDCYHGDGQSYRGTSSTTTTGKKCQSWSSMTPHRHQKTPENYPNAGLTMNYCRNPDADKGPWCFTTDPSVRWEYCNLKKCSGTEASVVAPPPVVLLPDVETPSEEDCMFGNGKGYRGKRATTVTGTPCQDWAAQEPHRHSIFTPETNPRAGLEKNYCRNPDGDVGGPWCYTTNPRKLYDYCDVPQCAAPSFDCGKPQVEPKKCPGRVVGGCVAHPHSWPWQVSLRTRFGMHFCGGTLISPEWVLTAAHCLEKSPRPSSYKVILGAHQEVNLEPHVQEIEVSRLFLEPTRKDIALLKLSSPAVITDKVIPACLPSPNYVVADRTECFITGWGETQGTFGAGLLKEAQLPVIENKVCNRYEFLNGRVQSTELCAGHLAGGTDSCQGDSGGPLVCFEKDKYILQGVTSWGLGCARPNKPGVYVRVSRFVTWIEGVMRNN

SEQ ID NO: 200 - DNA, 1527 bp, Homo sapiens
  Neurosin transcript variant A
ggcggacaaagcccgattgttcctgggccctttccccatcgcgcctgggcctgctccccagcccggggcaggggcgggggccagtgtggtgacacacgctgtagctgtctccccggctggctggctcgctctctcctggggacacagaggtcggcaggcagcacacagagggacctacgggcagctgttccttcccccgactcaagaatccccggaggcccggaggcctgcagcaggagcggccatgaagaagctgatggtggtgctgagtctgattgctgcagcctgggcagaggagcagaataagttggtgcatggcggaccctgcgacaagacatctcacccctaccaagctgccctctacacctcgggccacttgctctgtggtggggtccttatccatccactgtgggtcctcacagctgcccactgcaaaaaaccgaatcttcaggtcttcctggggaagcataaccttcggcaaagggagagttcccaggagcagagttctgttgtccgggctgtgatccaccctgactatgatgccgccagccatgaccaggacatcatgctgttgcgcctggcacgcccagccaaactctctgaactcatccagccccttcccctggagagggactgctcagccaacaccaccagctgccacatcctgggctggggcaagacagcagatggtgatttccctgacaccatccagtgtgcatacatccacctggtgtcccgtgaggagtgtgagcatgcctaccctggccagatcacccagaacatgttgtgtgctggggatgagaagtacgggaaggattcctgccagggtgattctgggggtccgctggtatgtggagaccacctccgaggccttgtgtcatggggtaacatcccctgtggatcaaaggagaagccaggagtctacaccaacgtctgcagatacacgaactggatccaaaaaaccattcaggccaagtgaccctgacatgtgacatctacctcccgacctaccaccccactggctggttccagaacgtctctcacctagaccttgcctcccctcctctcctgcccagctctgaccctgatgcttaataaacgcagcgacgtgagggtcctgattctccctggttttaccccagctccatccttgcatcactggggaggacgtgatgagtgaggacttgggtcctcggtcttacccccaccactaagagaatacaggaaaatcccttctaggcatctcctctccccaacccttccacacgtttgatttcttcctgcagaggcccagccacgtgtctggaatcccagctccgctgcttactgtcggtgtccccttgggatgtacctttcttcactgcagatttctcacctgtaagatgaagataaggatgatacagtctccataaggcagtggctgttggaaagatttaaggtttcacacctatgacatacatggaatagcacctgggccaccatgcactcaataaagaatgaattttattatgaaaaaaaaaaaaaaaa

SEQ ID NO: 201 - protein, 244 aa, Homo sapiens
  Neurosin isoform A
MKKLMVVLSLIAAAWAEEQNKLVHGGPCDKTSHPYQAALYTSGHLLCGGVLIHPLWVLTAAHCKKPNLQVFLGKHNLRQRESSQEQSSVVRAVIHPDYDAASHDQDIMLLRLARPAKLSELIQPLPLERDCSANTTSCHILGWGKTADGDFPDTIQCAYIHLVSREECEHAYPGQITQNMLCAGDEKYGKDSCQGDSGGPLVCGDHLRGLVSWGNIPCGSKEKPGVYTNVCRYTNWIQKTIQAK

SEQ ID NO: 202 - DNA, 1527 bp, Homo sapiens
  Neurosin transcript variant B
aggacgttccagaagcatctggggacagaaccagcctcttccagggaggcctgggagctgggggtgtgtgtctggcagtccctgcagccctgggctctgcggcccctgcgtcctccgcttggctctgccactgcatctgagtgtcttctctcctcacggctccccgcatttctaactctttctgcctcctcgtctcaaagctgttccttcccccgactcaagaatccccggaggcccggaggcctgcagcaggagcggccatgaagaagctgatggtggtgctgagtctgattgctgcagcctgggcagaggagcagaataagttggtgcatggcggaccctgcgacaagacatctcacccctaccaagctgccctctacacctcgggccacttgctctgtggtggggtccttatccatccactgtgggtcctcacagctgcccactgcaaaaaaccgaatcttcaggtcttcctggggaagcataaccttcggcaaagggagagttcccaggagcagagttctgttgtccgggctgtgatccaccctgactatgatgccgccagccatgaccaggacatcatgctgttgcgcctggcacgcccagccaaactctctgaactcatccagccccttcccctggagagggactgctcagccaacaccaccagctgccacatcctgggctggggcaagacagcagatggtgatttccctgacaccatccagtgtgcatacatccacctggtgtcccgtgaggagtgtgagcatgcctaccctggccagatcacccagaacatgttgtgtgctggggatgagaagtacgggaaggattcctgccagggtgattctgggggtccgctggtatgtggagaccacctccgaggccttgtgtcatggggtaacatcccctgtggatcaaaggagaagccaggagtctacaccaacgtctgcagatacacgaactggatccaaaaaaccattcaggccaagtgaccctgacatgtgacatctacctcccgacctaccaccccactggctggttccagaacgtctctcacctagaccttgcctcccctcctctcctgcccagctctgaccctgatgcttaataaacgcagcgacgtgagggtcctgattctccctggttttaccccagctccatccttgcatcactggggaggacgtgatgagtgaggacttgggtcctcggtcttacccccaccactaagagaatacaggaaaatcccttctaggcatctcctctccccaacccttccacacgtttgatttcttcctgcagaggcccagccacgtgtctggaatcccagctccgctgcttactgtcggtgtccccttgggatgtacctttcttcactgcagatttctcacctgtaagatgaagataaggatgatacagtctccataaggcagtggctgttggaaagatttaaggtttcacacctatgacatacatggaatagcacctgggccaccatgcactcaataaagaatgaattttattatg

SEQ ID NO: 203 - protein, 244 aa, Homo sapiens; identical to SEQ ID NO: 201
  Neurosin isoform A preprotein

SEQ ID NO: 204 - DNA, 1495 bp, Homo sapiens
  Neurosin transcript variant C
aggacgttccagaagcatctggggacagaaccagcctcttccagggaggcctgggagctgggggtgtgtgtctggcagtccctgcagccctgggctctgcggcccctgcgtcctccgcttggctctgccactgcatctgagtgtcttctctcctcacggctccccgcatttctaactctttctgcctcctcgtctcaaagctgttccttcccccgactcaagaatccccggaggcccggaggcctgcagcagcctgggcagaggagcagaataagttggtgcatggcggaccctgcgacaagacatctcacccctaccaagctgccctctacacctcgggccacttgctctgtggtggggtccttatccatccactgtgggtcctcacagctgcccactgcaaaaaaccgaatcttcaggtcttcctggggaagcataaccttcggcaaagggagagttcccaggagcagagttctgttgtccgggctgtgatccaccctgactatgatgccgccagccatgaccaggacatcatgctgttgcgcctggcacgcccagccaaactctctgaactcatccagccccttcccctggagagggactgctcagccaacaccaccagctgccacatcctgggctggggcaagacagcagatggtgatttccctgacaccatccagtgtgcatacatccacctggtgtcccgtgaggagtgtgagcatgcctaccctggccagatcacccagaacatgttgtgtgctggggatgagaagtacgggaaggattcctgccagggtgattctgggggtccgctggtatgtggagaccacctccgaggccttgtgtcatggggtaacatcccctgtggatcaaaggagaagccaggagtctacaccaacgtctgcagatacacgaactggatccaaaaaaccattcaggccaagtgaccctgacatgtgacatctacctcccgacctaccaccccactggctggttccagaacgtctctcacctagaccttgcctcccctcctctcctgcccagctctgaccctgatgcttaataaacgcagcgacgtgagggtcctgattctccctggttttaccccagctccatccttgcatcactggggaggacgtgatgagtgaggacttgggtcctcggtcttacccccaccactaagagaatacaggaaaatcccttctaggcatctcctctccccaacccttccacacgtttgatttcttcctgcagaggcccagccacgtgtctggaatcccagctccgctgcttactgtcggtgtccccttgggatgtacctttcttcactgcagatttctcacctgtaagatgaagataaggatgatacagtctccataaggcagtggctgttggaaagatttaaggtttcacacctatgacatacatggaatagcacctgggccaccatgcactcaataaagaatgaattttattatgaaaaaaaaaaaaaaaa

SEQ ID NO: 205 - protein, 137 aa, Homo sapiens
  Neurosin isoform B
MLLRLARPAKLSELIQPLPLERDCSANTTSCHILGWGKTADGDFPDTIQCAYIHLVSREECEHAYPGQITQNMLCAGDEKYGKDSCQGDSGGPLVCGDHLRGLVSWGNIPCGSKEKPGVYTNVCRYTNWIQKTIQAK

SEQ ID NO: 206 - DNA, 1386 bp, Homo sapiens
  Neurosin transcript variant D
aggacgttccagaagcatctggggacagaaccagcctcttccagggaggcctgggagctgggggtgtgtgtctggcagtccctgcagccctgggctctgcggcccctgcgtcctccgcttggctctgccactgcatctgagtgtcttctctcctcacggctccccgcatttctaactctttctgcctcctcgtctcaaagctgttccttcccccgactcaagaatccccggaggcccggaggcctgcagcaggagcggccatgaagaagctgatggtggtgctgagtctgattgctgcaggaatcttcaggtcttcctggggaagcataaccttcggcaaagggagagttcccaggagcagagttctgttgtccgggctgtgatccaccctgactatgatgccgccagccatgaccaggacatcatgctgttgcgcctggcacgcccagccaaactctctgaactcatccagccccttcccctggagagggactgctcagccaacaccaccagctgccacatcctgggctggggcaagacagcagatggtgatttccctgacaccatccagtgtgcatacatccacctggtgtcccgtgaggagtgtgagcatgcctaccctggccagatcacccagaacatgttgtgtgctggggatgagaagtacgggaaggattcctgccagggtgattctgggggtccgctggtatgtggagaccacctccgaggccttgtgtcatggggtaacatcccctgtggatcaaaggagaagccaggagtctacaccaacgtctgcagatacacgaactggatccaaaaaaccattcaggccaagtgaccctgacatgtgacatctacctcccgacctaccaccccactggctggttccagaacgtctctcacctagaccttgcctcccctcctctcctgcccagctctgaccctgatgcttaataaacgcagcgacgtgagggtcctgattctccctggttttaccccagctccatccttgcatcactggggaggacgtgatgagtgaggacttgggtcctcggtcttacccccaccactaagagaatacaggaaaatcccttctaggcatctcctctccccaacccttccacacgtttgatttcttcctgcagaggcccagccacgtgtctggaatcccagctccgctgcttactgtcggtgtccccttgggatgtacctttcttcactgcagatttctcacctgtaagatgaagataaggatgatacagtctccataaggcagtggctgttggaaagatttaaggtttcacacctatgacatacatggaatagcacctgggccaccatgcactcaataaagaatgaattttattatgaaaaaaaaaaaaaaaa

SEQ ID NO: 207 - protein, 40 aa, Homo sapiens
  Neurosin isoform C
MKKLMVVLSLIAAGIFRSSWGSITFGKGRVPRSRVLLSGL

SEQ ID NO: 208 - DNA, 3351 bp, Homo sapiens
  Neurotrypsin
gcccgagaagctggggagcatggaccagaccccgcagcgctggcaccatgacgctcgcccgcttcgtgctagccctgatgttaggggcgctccccgaagtggtcggctttgattctgtcctcaatgattccctccaccacagccaccgccattcgccccctgcgggtccgcactacccctattaccttcccacccagcagcggcccccgacgacgcgtccgccgccgcctctcccgcgcttcccgcgccccccgcgggcgctccctgcccagcgcccgcacgccctccaggccgggcacacgccccggccgcacccctggggctgccccgccggcgagccatgggtcagcgtgacggacttcggcgccccgtgtctgcggtgggcggaggtgccacccttcctggagcggtcgcccccagcgagctgggctcagctgcgaggacagcgccacaacttttgtcggagccccgacggcgcgggcagaccctggtgtttctacggagacgcccgtggcaaggtggactggggctactgcgactgcagacacggatcagtacgacttcgtggcggcaaaaatgagtttgaaggcacagtggaagtatatgcaagtggagtttggggcactgtctgtagcagccactgggatgattctgatgcatcagtcatttgtcaccagctgcagctgggaggaaaaggaatagcaaaacaaaccccgttttctggactgggccttattcccatttattggagcaatgtccgttgccgaggagatgaagaaaatatactgctttgtgaaaaagacatctggcagggtggggtgtgtcctcagaagatggcagctgctgtcacgtgtagcttttcccatggcccaacgttccccatcattcgccttgctggaggcagcagtgtgcatgaaggccgggtggagctctaccatgctggccagtggggaaccgtttgtgatgaccaatgggatgatgccgatgcagaagtgatctgcaggcagctgggcctcagtggcattgccaaagcatggcatcaggcatattttggggaagggtctggcccagttatgttggatgaagtacgctgcactgggaatgagctttcaattgagcagtgtccaaagagctcctggggagagcataactgtggccataaagaagatgctggagtgtcctgtacccctctaacagatggggtcatcagacttgcaggtgggaaaggcagccatgagggtcgcttggaggtatattacagaggccagtggggaactgtctgtgatgatggctggactgagctgaatacatacgtggtttgtcgacagttgggatttaaatatggtaaacaagcatctgccaaccattttgaagaaagcacagggcccatatggttggatgacgtcagctgctcaggaaaggaaaccagatttcttcagtgttccaggcgacagtggggaaggcatgactgcagccaccgcgaagatgttagcattgcctgctaccctggcggcgagggacacaggctctctctgggttttcctgtcagactgatggatggagaaaataagaaagaaggacgagtggaggtttttatcaatggccagtggggaacaatctgtgatgatggatggactgataaggatgcagctgtgatctgtcgtcagcttggctacaagggtcctgccagagcaagaaccatggcttactttggagaaggaaaaggacccatccatgtggataatgtgaagtgcacaggaaatgagaggtccttggctgactgtatcaagcaagatattggaagacacaactgccgccacagtgaagatgcaggagttatttgtgattattttggcaagaaggcctcaggtaacagtaataaagagtccctctcatctgtttgtggcttgagattactgcaccgtcggcagaagcggatcattggtgggaaaaattctttaaggggtggttggccttggcaggtttccctccggctgaagtcatcccatggagatggcaggctcctctgcggggctacgctcctgagtagctgctgggtcctcacagcagcacactgtttcaagaggtatggcaacagcactaggagctatgctgttagggttggagattatcatactctggtaccagaggagtttgaggaagaaattggagttcaacagattgtgattcatcgggagtatcgacccgaccgcagtgattatgacatagccctggttagattacaaggaccagaagagcaatgtgccagattcagcagccatgttttgccagcctgtttaccactctggagagagaggccacagaaaacagcatccaactgttacataacaggatggggtgacacaggacgagcctattcaagaacactacaacaagcagccattcccttacttcctaaaaggttttgtgaagaacgttataagggtcggtttacagggagaatgctttgtgctggaaacctccatgaacacaaacgcgtggacagctgccagggagacagcggaggaccactcatgtgtgaacggcccggagagagctgggtggtgtatggggtgacctcctgggggtatggctgtggagtcaaggattctcctggtgtttataccaaagtctcagcctttgtaccttggataaaaagtgtcaccaaactgtaattcttcatggaaacttcaaagcagcatttaaacaaatggaaaactttgaacccccactattagcactcagcagagatgacaacaaatggcaagatctgtttttgctttgtgttgtggtaaaaaattgtgtaccccctgctgcttttgagaaatttgtgaacattttcagaggcctcagtgtagtggaagtgataatccttaaatgaacattttctaccctaatttcactggagtgacttattctaagcctcatctatcccctacctatttctcaaaatcattctatgctgattttacaaaagatcatttttacatttgaactgagaaccccttttaattgaatcagtggtgtctgaaatcatattaaatacccacatttgacataaatgcggtaccctttactacactcatgagtggcatatttatgcttaggtcttttcaaaagacttgacaagaaatcttcatattctctgtagcctttgtcaagtgaggaaatcagtggttaaagaattccactataaacttttaggcctgaataggagtagtaaagcctcaaggacatctgcctgtcacaatatattctcaaagtgatctgatatttggaaacaagtatccttgttgagtaccaagtgctacagaaaccataagataaaaatactttctacctacagcgtgc

SEQ ID NO: 209 - protein, 875 aa, Homo sapiens
  Neurotrypsin
MTLARFVLALMLGALPEVVGFDSVLNDSLHHSHRHSPPAGPHYPYYLPTQQRPPTTRPPPPLPRFPRPPRALPAQRPHALQAGHTPRPHPWGCPAGEPWVSVTDFGAPCLRWAEVPPFLERSPPASWAQLRGQRHNFCRSPDGAGRPWCFYGDARGKVDWGYCDCRHGSVRLRGGKNEFEGTVEVYASGVWGTVCSSHWDDSDASVICHQLQLGGKGIAKQTPFSGLGLIPIYWSNVRCRGDEENILLCEKDIWQGGVCPQKMAAAVTCSFSHGPTFPIIRLAGGSSVHEGRVELYHAGQWGTVCDDQWDDADAEVICRQLGLSGIAKAWHQAYFGEGSGPVMLDEVRCTGNELSIEQCPKSSWGEHNCGHKEDAGVSCTPLTDGVIRLAGGKGSHEGRLEVYYRGQWGTVCDDGWTELNTYVVCRQLGFKYGKQASANHFEESTGPIWLDDVSCSGKETRFLQCSRRQWGRHDCSHREDVSIACYPGGEGHRLSLGFPVRLMDGENKKEGRVEVFINGQWGTICDDGWTDKDAAVICRQLGYKGPARARTMAYFGEGKGPIHVDNVKCTGNERSLADCIKQDIGRHNCRHSEDAGVICDYFGKKASGNSNKESLSSVCGLRLLHRRQKRIIGGKNSLRGGWPWQVSLRLKSSHGDGRLLCGATLLSSCWVLTAAHCFKRYGNSTRSYAVRVGDYHTLVPEEFEEEIGVQQIVIHREYRPDRSDYDIALVRLQGPEEQCARFSSHVLPACLPLWRERPQKTASNCYITGWGDTGRAYSRTLQQAAIPLLPKRFCEERYKGRFTGRMLCAGNLHEHKRVDSCQGDSGGPLMCERPGESWVVYGVTSWGYGCGVKDSPGVYTKVSAFVPWIKSVTKL

SEQ ID NO: 210 - DNA, 1165 bp, Homo sapiens
  tryptase beta 2 (I)
agaaggaacagggagcggccaggatgctgaatctgctgctgctggcgctgcccgtcctggcgagccgcgcctacgcggcccctgccccaggccaggccctgcagcgagtgggcatcgttgggggtcaggaggcccccaggagcaagtggccctggcaggtgagcctgagagtccgcgaccgatactggatgcacttctgcgggggctccctcatccacccccagtgggtgctgaccgcagcgcactgcgtgggaccggacgtcaaggatctggccgccctcagggtgcaactgcgggagcagcacctctactaccaggaccagctgctgccggtcagcaggatcatcgtgcacccacagttctacaccgcccagatcggagcggacatcgccctgctggagctggaggagccggtgaacgtctccagccacgtccacacggtcaccctgccccctgcctcagagaccttccccccggggatgccgtgctgggtcactggctggggcgatgtggacaatgatgagcgcctcccaccgccatttcctctgaagcaggtgaaggtccccataatggaaaaccacatttgtgacgcaaaataccaccttggcgcctacacgggagacgacgtccgcatcgtccgtgacgacatgctgtgtgccgggaacacccggagggactcatgccagggcgactccggagggcccctggtgtgcaaggtgaatggcacctggctgcaggcgggcgtggtcagctggggcgagggctgtgcccagcccaaccggcctggcatctacacccgtgtcacctactacttggactggatccaccactatgtccccaaaaagccgtgagtcaggcctggggtgtccacctgggtcactggagagccagcccctcctgtccaaaacaccactgcttcctacccaggtggcgactgccccccacaccttccctgccccgtcctgagtgccccttcctgtcctaagccccctgctctcttctgagccccttcccctgtcctgaggacccttccccatcctgagcccccttccctgtcctaagcctgacgcctgcaccgggccctccggccctcccctgcccaggcagctggtggtgggcgctaatcctcctgagtgctggacctcattaaagtgcatggaaatca

SEQ ID NO: 211 - protein, 275 aa, Homo sapiens
  tryptase beta 2 (I)
MLNLLLLALPVLASRAYAAPAPGQALQRVGIVGGQEAPRSKWPWQVSLRVRDRYWMHFCGGSLIHPQWVLTAAHCVGPDVKDLAALRVQLREQHLYYQDQLLPVSRIIVHPQFYTAQIGADIALLELEEPVNVSSHVHTVTLPPASETFPPGMPCWVTGWGDVDNDERLPPPFPLKQVKVPIMENHICDAKYHLGAYTGDDVRIVRDDMLCAGNTRRDSCQGDSGGPLVCKVNGTWLQAGVVSWGEGCAQPNRPGIYTRVTYYLDWIHHYVPKKP

SEQ ID NO: 212 - DNA, 1013 bp, Homo sapiens
  Neuropsin transcript variant 1
gttcccagaagctccccaggctctagtgcaggaggagaaggaggaggagcaggaggtggagattcccagttaaaaggctccagaatcgtgtaccaggcagagaactgaagtactggggcctcctccactgggtccgaatcagtaggtgaccccgcccctggattctggaagacctcaccatgggacgcccccgacctcgtgcggccaagacgtggatgttcctgctcttgctggggggagcctgggcaggacactccagggcacaggaggacaaggtgctggggggtcatgagtgccaaccccattcgcagccttggcaggcggccttgttccagggccagcaactactctgtggcggtgtccttgtaggtggcaactgggtccttacagctgcccactgtaaaaaaccgaaatacacagtacgcctgggagaccacagcctacagaataaagatggcccagagcaagaaatacctgtggttcagtccatcccacacccctgctacaacagcagcgatgtggaggaccacaaccatgatctgatgcttcttcaactgcgtgaccaggcatccctggggtccaaagtgaagcccatcagcctggcagatcattgcacccagcctggccagaagtgcaccgtctcaggctggggcactgtcaccagtccccgagagaattttcctgacactctcaactgtgcagaagtaaaaatctttccccagaagaagtgtgaggatgcttacccggggcagatcacagatggcatggtctgtgcaggcagcagcaaaggggctgacacgtgccagggcgattctggaggccccctggtgtgtgatggtgcactccagggcatcacatcctggggctcagacccctgtgggaggtccgacaaacctggcgtctataccaacatctgccgctacctggactggatcaagaagatcataggcagcaagggctgattctaggataagcactagatctcccttaataaactcacaactctctggttc

SEQ ID NO: 213 - protein, 260 aa, Homo sapiens
  Neuropsin isoform 1
MGRPRPRAAKTWMFLLLLGGAWAGHSRAQEDKVLGGHECQPHSQPWQAALFQGQQLLCGGVLVGGNWVLTAAHCKKPKYTVRLGDHSLQNKDGPEQEIPVVQSIPHPCYNSSDVEDHNHDLMLLQLRDQASLGSKVKPISLADHCTQPGQKCTVSGWGTVTSPRENFPDTLNCAEVKIFPQKKCEDAYPGQITDGMVCAGSSKGADTCQGDSGGPLVCDGALQGITSWGSDPCGRSDKPGVYTNICRYLDWIKKIIGSKG

SEQ ID NO: 214 - DNA, 1148 bp, Homo sapiens
  Neuropsin transcript variant 2
gttcccagaagctccccaggctctagtgcaggaggagaaggaggaggagcaggaggtggagattcccagttaaaaggctccagaatcgtgtaccaggcagagaactgaagtactggggcctcctccactgggtccgaatcagtaggtgaccccgcccctggattctggaagacctcaccatgggacgcccccgacctcgtgcggccaagacgtggatgttcctgctcttgctggggggagcctgggcagcgtgtggaagcctggacctcctcactaagttgtatgcggagaacttgccgtgtgtccatttgaacccacagtggccttcccagccctcgcactgccccagagggtggcgatccaaccctctccctcctgctgcaggacactccagggcacaggaggacaaggtgctggggggtcatgagtgccaaccccattcgcagccttggcaggcggccttgttccagggccagcaactactctgtggcggtgtccttgtaggtggcaactgggtccttacagctgcccactgtaaaaaaccgaaatacacagtacgcctgggagaccacagcctacagaataaagatggcccagagcaagaaatacctgtggttcagtccatcccacacccctgctacaacagcagcgatgtggaggaccacaaccatgatctgatgcttcttcaactgcgtgaccaggcatccctggggtccaaagtgaagcccatcagcctggcagatcattgcacccagcctggccagaagtgcaccgtctcaggctggggcactgtcaccagtccccgagagaattttcctgacactctcaactgtgcagaagtaaaaatctttccccagaagaagtgtgaggatgcttacccggggcagatcacagatggcatggtctgtgcaggcagcagcaaaggggctgacacgtgccagggcgattctggaggccccctggtgtgtgatggtgcactccagggcatcacatcctggggctcagacccctgtgggaggtccgacaaacctggcgtctataccaacatctgccgctacctggactggatcaagaagatcataggcagcaagggctgattctaggataagcactagatctcccttaataaactcacaactctctggttc

SEQ ID NO: 215 - protein, 305 aa, Homo sapiens
  Neuropsin isoform 2
MGRPRPRAAKTWMFLLLLGGAWAACGSLDLLTKLYAENLPCVHLNPQWPSQPSHCPRGWRSNPLPPAAGHSRAQEDKVLGGHECQPHSQPWQAALFQGQQLLCGGVLVGGNWVLTAAHCKKPKYTVRLGDHSLQNKDGPEQEIPVVQSIPHPCYNSSDVEDHNHDLMLLQLRDQASLGSKVKPISLADHCTQPGQKCTVSGWGTVTSPRENFPDTLNCAEVKIFPQKKCEDAYPGQITDGMVCAGSSKGADTCQGDSGGPLVCDGALQGITSWGSDPCGRSDKPGVYTNICRYLDWIKKIIGSKG

SEQ ID NO: 216 - DNA, 590 bp, Homo sapiens
  Neuropsin transcript variant 3
gttcccagaagctccccaggctctagtgcaggaggagaaggaggaggagcaggaggtggagattcccagttaaaaggctccagaatcgtgtaccaggcagagaactgaagtactggggcctcctccactgggtccgaatcagtaggtgaccccgcccctggattctggaagacctcaccatgggacgcccccgacctcgtgcggccaagacgtggatgttcctgctcttgctggggggagcctgggcagagaattttcctgacactctcaactgtgcagaagtaaaaatctttccccagaagaagtgtgaggatgcttacccggggcagatcacagatggcatggtctgtgcaggcagcagcaaaggggctgacacgtgccagggcgattctggaggccccctggtgtgtgatggtgcactccagggcatcacatcctggggctcagacccctgtgggaggtccgacaaacctggcgtctataccaacatctgccgctacctggactggatcaagaagatcataggcagcaagggctgattctaggataagcactagatctcccttaataaactcacaactctctggttc

SEQ ID NO: 217 - protein, 119 aa, Homo sapiens
  Neuropsin isoform 3
MGRPRPRAAKTWMFLLLLGGAWAENFPDTLNCAEVKIFPQKKCEDAYPGQITDGMVCAGSSKGADTCQGDSGGPLVCDGALQGITSWGSDPCGRSDKPGVYTNICRYLDWIKKIIGSKG

SEQ ID NO: 218 - DNA, 456 bp, Homo sapiens
  Neuropsin transcript variant 4
gttcccagaagctccccaggctctagtgcaggaggagaaggaggaggagcaggaggtggagattcccagttaaaaggctccagaatcgtgtaccaggcagagaactgaagtactggggcctcctccactgggtccgaatcagtaggtgaccccgcccctggattctggaagacctcaccatgggacgcccccgacctcgtgcggccaagacgtggatgttcctgctcttgctggggggagcctgggcagggcgattctggaggccccctggtgtgtgatggtgcactccagggcatcacatcctggggctcagacccctgtgggaggtccgacaaacctggcgtctataccaacatctgccgctacctggactggatcaagaagatcataggcagcaagggctgattctaggataagcactagatctcccttaataaactcacaactctctggttc

SEQ ID NO: 219 - protein, 32 aa, Homo sapiens
  Neuropsin isoform 4
MGRPRPRAAKTWMFLLLLGGAWAGRFWRPPGV

SEQ ID NO: 220 - DNA, 1580 bp, Homo sapiens
  kallikrein hK10 transcript variant 1
catcctgccacccctagccttgctggggacgtgaaccctctccccgcgcctgggaagccttcttggcaccgggacccggagaatccccacggaagccagttccaaaagggatgaaaagggggcgtttcgggcactgggagaagcctgtattccagggcccctcccagagcaggaatctgggacccaggagtgccagcctcacccacgcagatcctggccatgagagctccgcacctccacctctccgccgcctctggcgcccgggctctggcgaagctgctgccgctgctgatggcgcaactctgggccgcagaggcggcgctgctcccccaaaacgacacgcgcttggaccccgaagcctatggctccccgtgcgcgcgcggctcgcagccctggcaggtctcgctcttcaacggcctctcgttccactgcgcgggtgtcctggtggaccagagttgggtgctgacggccgcgcactgcggaaacaagccactgtgggctcgagtaggggatgaccacctgctgcttcttcagggagagcagctccgccggaccactcgctctgttgtccatcccaagtaccaccagggctcaggccccatcctgccaaggcgaacggatgagcacgatctcatgttgctgaagctggccaggcccgtagtgctggggccccgcgtccgggccctgcagcttccctaccgctgtgctcagcccggagaccagtgccaggttgctggctggggcaccacggccgcccggagagtgaagtacaacaagggcctgacctgctccagcatcactatcctgagccctaaagagtgtgaggtcttctaccctggcgtggtcaccaacaacatgatatgtgctggactggaccggggccaggacccttgccagagtgactctggaggccccctggtctgtgacgagaccctccaaggcatcctctcgtggggtgtttacccctgtggctctgcccagcatccagctgtctacacccagatctgcaaatacatgtcctggatcaataaagtcatacgctccaactgatccagatgctacgctccagctgatccagatgttatgctcctgctgatccagatgcccagaggctccatcgtccatcctcttcctccccagtcggctgaactctccccttgtctgcactgttcaaacctctgccgccctccacacctctaaacatctcccctctcacctcattcccccacctatccccattctctgcctgtactgaagctgaaatgcaggaagtggtggcaaaggtttattccagagaagccaggaagccggtcatcacccagcctctgagagcagttactggggtcacccaacctgacttcctctgccactccctgctgtgtgactttgggcaagccaagtgccctctctgaacctcagtttcctcatctgcaaaatgggaacaatgacgtgcctacctcttagacatgttgtgaggagactatgatataacatgtgtatgtaaatcttcatggtgattgtcatgtaaggcttaacacagtgggtggtgagttctgactaaaggttacctgttgtcgtga

SEQ ID NO: 221 - protein, 276 aa, Homo sapiens
  kallikrein hK10
MRAPHLHLSAASGARALAKLLPLLMAQLWAAEAALLPQNDTRLDPEAYGSPCARGSQPWQVSLFNGLSFHCAGVLVDQSWVLTAAHCGNKPLWARVGDDHLLLLQGEQLRRTTRSVVHPKYHQGSGPILPRRTDEHDLMLLKLARPVVLGPRVRALQLPYRCAQPGDQCQVAGWGTTAARRVKYNKGLTCSSITILSPKECEVFYPGVVTNNMICAGLDRGQDPCQSDSGGPLVCDETLQGILSWGVYPCGSAQHPAVYTQICKYMSWINKVIRSN

SEQ ID NO: 222 - DNA, 1443 bp, Homo sapiens
  kallikrein hK10 transcript variant 2
accagcggcagaccacaggcagggcagaggcacgtctgggtcccctccctccttcctatcggcgactcccaggatcctggccatgagagctccgcacctccacctctccgccgcctctggcgcccgggctctggcgaagctgctgccgctgctgatggcgcaactctgggccgcagaggcggcgctgctcccccaaaacgacacgcgcttggaccccgaagcctatggctccccgtgcgcgcgcggctcgcagccctggcaggtctcgctcttcaacggcctctcgttccactgcgcgggtgtcctggtggaccagagttgggtgctgacggccgcgcactgcggaaacaagccactgtgggctcgagtaggggatgaccacctgctgcttcttcagggagagcagctccgccggaccactcgctctgttgtccatcccaagtaccaccagggctcaggccccatcctgccaaggcgaacggatgagcacgatctcatgttgctgaagctggccaggcccgtagtgctggggccccgcgtccgggccctgcagcttccctaccgctgtgctcagcccggagaccagtgccaggttgctggctggggcaccacggccgcccggagagtgaagtacaacaagggcctgacctgctccagcatcactatcctgagccctaaagagtgtgaggtcttctaccctggcgtggtcaccaacaacatgatatgtgctggactggaccggggccaggacccttgccagagtgactctggaggccccctggtctgtgacgagaccctccaaggcatcctctcgtggggtgtttacccctgtggctctgcccagcatccagctgtctacacccagatctgcaaatacatgtcctggatcaataaagtcatacgctccaactgatccagatgctacgctccagctgatccagatgttatgctcctgctgatccagatgcccagaggctccatcgtccatcctcttcctccccagtcggctgaactctccccttgtctgcactgttcaaacctctgccgccctccacacctctaaacatctcccctctcacctcattcccccacctatccccattctctgcctgtactgaagctgaaatgcaggaagtggtggcaaaggtttattccagagaagccaggaagccggtcatcacccagcctctgagagcagttactggggtcacccaacctgacttcctctgccactccctgctgtgtgactttgggcaagccaagtgccctctctgaacctcagtttcctcatctgcaaaatgggaacaatgacgtgcctacctcttagacatgttgtgaggagactatgatataacatgtgtatgtaaatcttcatggtgattgtcatgtaaggcttaacacagtgggtggtgagttctgactaaaggttacctgttgtcgtga

SEQ ID NO: 223 - protein, 276 aa, Homo sapiens; identical to SEQ ID NO: 221
  kallikrein hK10

SEQ ID NO: 224 - DNA, 3226 bp, Homo sapiens
  Epitheliasin
cgcgagctaagcaggaggcggaggcggaggcggagggcgaggggcggggagcgccgcctggagcgcggcaggtcatattgaacattccagatacctatcattactcgatgctgttgataacagcaagatggctttgaactcagggtcaccaccagctattggaccttactatgaaaaccatggataccaaccggaaaacccctatcccgcacagcccactgtggtccccactgtctacgaggtgcatccggctcagtactacccgtcccccgtgccccagtacgccccgagggtcctgacgcaggcttccaaccccgtcgtctgcacgcagcccaaatccccatccgggacagtgtgcacctcaaagactaagaaagcactgtgcatcaccttgaccctggggaccttcctcgtgggagctgcgctggccgctggcctactctggaagttcatgggcagcaagtgctccaactctgggatagagtgcgactcctcaggtacctgcatcaacccctctaactggtgtgatggcgtgtcacactgccccggcggggaggacgagaatcggtgtgttcgcctctacggaccaaacttcatccttcagatgtactcatctcagaggaagtcctggcaccctgtgtgccaagacgactggaacgagaactacgggcgggcggcctgcagggacatgggctataagaataatttttactctagccaaggaatagtggatgacagcggatccaccagctttatgaaactgaacacaagtgccggcaatgtcgatatctataaaaaactgtaccacagtgatgcctgttcttcaaaagcagtggtttctttacgctgtatagcctgcggggtcaacttgaactcaagccgccagagcaggatcgtgggcggtgagagcgcgctcccgggggcctggccctggcaggtcagcctgcacgtccagaacgtccacgtgtgcggaggctccatcatcacccccgagtggatcgtgacagccgcccactgcgtggaaaaacctcttaacaatccatggcattggacggcatttgcggggattttgagacaatctttcatgttctatggagccggataccaagtagaaaaagtgatttctcatccaaattatgactccaagaccaagaacaatgacattgcgctgatgaagctgcagaagcctctgactttcaacgacctagtgaaaccagtgtgtctgcccaacccaggcatgatgctgcagccagaacagctctgctggatttccgggtggggggccaccgaggagaaagggaagacctcagaagtgctgaacgctgccaaggtgcttctcattgagacacagagatgcaacagcagatatgtctatgacaacctgatcacaccagccatgatctgtgccggcttcctgcaggggaacgtcgattcttgccagggtgacagtggagggcctctggtcacttcgaagaacaatatctggtggctgataggggatacaagctggggttctggctgtgccaaagcttacagaccaggagtgtacgggaatgtgatggtattcacggactggatttatcgacaaatgagggcagacggctaatccacatggtcttcgtccttgacgtcgttttacaagaaaacaatggggctggttttgcttccccgtgcatgatttactcttagagatgattcagaggtcacttcatttttattaaacagtgaacttgtctggctttggcactctctgccattctgtgcaggctgcagtggctcccctgcccagcctgctctccctaaccccttgtccgcaaggggtgatggccggctggttgtgggcactggcggtcaagtgtggaggagaggggtggaggctgccccattgagatcttcctgctgagtcctttccaggggccaattttggatgagcatggagctgtcacctctcagctgctggatgacttgagatgaaaaaggagagacatggaaagggagacagccaggtggcacctgcagcggctgccctctggggccacttggtagtgtccccagcctacctctccacaaggggattttgctgatgggttcttagagccttagcagccctggatggtggccagaaataaagggaccagcccttcatgggtggtgacgtggtagtcacttgtaaggggaacagaaacatttttgttcttatggggtgagaatatagacagtgcccttggtgcgagggaagcaattgaaaaggaacttgccctgagcactcctggtgcaggtctccacctgcacattgggtggggctcctgggagggagactcagccttcctcctcatcctccctgaccctgctcctagcaccctggagagtgcacatgccccttggtcctggcagggcgccaagtctggcaccatgttggcctcttcaggcctgctagtcactggaaattgaggtccatgggggaaatcaaggatgctcagtttaaggtacactgtttccatgttatgtttctacacattgctacctcagtgctcctggaaacttagcttttgatgtctccaagtagtccaccttcatttaactctttgaaactgtatcacctttgccaagtaagagtggtggcctatttcagctgctttgacaaaatgactggctcctgacttaacgttctataaatgaatgtgctgaagcaaagtgcccatggtggcggcgaagaagagaaagatgtgttttgttttggactctctgtggtcccttccaatgctgtgggtttccaaccaggggaagggtcccttttgcattgccaagtgccataaccatgagcactactctaccatggttctgcctcctggccaagcaggctggtttgcaagaatgaaatgaatgattctacagctaggacttaaccttgaaatggaaagtcttgcaatcccatttgcaggatccgtctgtgcacatgcctctgtagagagcagcattcccagggaccttggaaacagttggcactgtaaggtgcttgctccccaagacacatcctaaaaggtgttgtaatggtgaaaacgtcttccttctttattgccccttcttatttatgtgaacaactgtttgtctttttttgtatcttttttaaactgtaaagttcaattgtgaaaatgaatatcatgcaaataaattatgcgatttttttttcaaagcaaaaaaaaaaaaaaaaaaaaaaaaaaaaaaa

SEQ ID NO: 225 - protein, 492 aa, Homo sapiens
  Epitheliasin
MALNSGSPPAIGPYYENHGYQPENPYPAQPTVVPTVYEVHPAQYYPSPVPQYAPRVLTQASNPVVCTQPKSPSGTVCTSKTKKALCITLTLGTFLVGAALAAGLLWKFMGSKCSNSGIECDSSGTCINPSNWCDGVSHCPGGEDENRCVRLYGPNFILQMYSSQRKSWHPVCQDDWNENYGRAACRDMGYKNNFYSSQGIVDDSGSTSFMKLNTSAGNVDIYKKLYHSDACSSKAVVSLRCIACGVNLNSSRQSRIVGGESALPGAWPWQVSLHVQNVHVCGGSIITPEWIVTAAHCVEKPLNNPWHWTAFAGILRQSFMFYGAGYQVEKVISHPNYDSKTKNNDIALMKLQKPLTFNDLVKPVCLPNPGMMLQPEQLCWISGWGATEEKGKTSEVLNAAKVLLIETQRCNSRYVYDNLITPAMICAGFLQGNVDSCQGDSGGPLVTSKNNIWWLIGDTSWGSGCAKAYRPGVYGNVMVFTDWIYRQMRADG

SEQ ID NO: 226 - DNA, 1280 bp, Homo sapiens
  Prostase
atggccacagcaggaaatccctggggctggttcctggggtacctcatccttggtgtcgcaggatctctcgtctctggtagctgcagccaaatcataaacggcgaggactgcagcccgcactcgcagccctggcaggcggcactggtcatggaaaacgaattgttctgctcgggcgtcctggtgcatccgcagtgggtgctgtcagccgcacactgtttccagaactcctacaccatcgggctgggcctgcacagtcttgaggccgaccaagagccagggagccagatggtggaggccagcctctccgtacggcacccagagtacaacagacccttgctcgctaacgacctcatgctcatcaagttggacgaatccgtgtccgagtctgacaccatccggagcatcagcattgcttcgcagtgccctaccgcggggaactcttgcctcgtttctggctggggtctgctggcgaacggcagaatgcctaccgtgctgcagtgcgtgaacgtgtcggtggtgtctgaggaggtctgcagtaagctctatgacccgctgtaccaccccagcatgttctgcgccggcggagggcaagaccagaaggactcctgcaacggtgactctggggggcccctgatctgcaacgggtacttgcagggccttgtgtctttcggaaaagccccgtgtggccaagttggcgtgccaggtgtctacaccaacctctgcaaattcactgagtggatagagaaaaccgtccaggccagttaactctggggactgggaacccatgaaattgacccccaaatacatcctgcggaaggaattcaggaatatctgttcccagcccctcctccctcaggcccaggagtccaggcccccagcccctcctccctcaaaccaagggtacagatccccagcccctcctccctcagacccaggagtccagaccccccagcccctcctccctcagacccaggagtccagcccctcctccctcagacccaggagtccagaccccccagcccctcctccctcagacccaggggtccaggcccccaacccctcctccctcagactcagaggtccaagcccccaacccctccttccccagacccagaggtccaggtcccagcccctcctccctcagacccagcggtccaatgccacctagactctccctgtacacagtgcccccttgtggcacgttgacccaaccttaccagttggtttttcattttttgtccctttcccctagatccagaaataaagtctaagagaagcgc

SEQ ID NO: 227 - protein, 254 aa, Homo sapiens
  Prostase
MATAGNPWGWFLGYLILGVAGSLVSGSCSQIINGEDCSPHSQPWQAALVMENELFCSGVLVHPQWVLSAAHCFQNSYTIGLGLHSLEADQEPGSQMVEASLSVRHPEYNRPLLANDLMLIKLDESVSESDTIRSISIASQCPTAGNSCLVSGWGLLANGRMPTVLQCVNVSVVSEEVCSKLYDPLYHPSMFCAGGGQDQKDSCNGDSGGPLICNGYLQGLVSFGKAPCGQVGVPGVYTNLCKFTEWIEKTVQAS

SEQ ID NO: 228 - DNA, 1391 bp, Homo sapiens
  Brain serine proteinase 2
acacaccctgacccgcatcgccctgggtctctcgagcctgctgcctgctcccccgccccaccagccatggtggtttctggagcgcccccagccctgggtgggggctgtctcggcaccttcacctccctgctgctgctggcgtcgacagccatcctcaatgcggccaggatacctgttcccccagcctgtgggaagccccagcagctgaaccgggttgtgggcggcgaggacagcactgacagcgagtggccctggatcgtgagcatccagaagaatgggacccaccactgcgcaggttctctgctcaccagccgctgggtgatcactgctgcccactgtttcaaggacaacctgaacaaaccatacctgttctctgtgctgctgggggcctggcagctggggaaccctggctctcggtcccagaaggtgggtgttgcctgggtggagccccaccctgtgtattcctggaaggaaggtgcctgtgcagacattgccctggtgcgtctcgagcgctccatacagttctcagagcgggtcctgcccatctgcctacctgatgcctctatccacctccctccaaacacccactgctggatctcaggctgggggagcatccaagatggagttcccttgccccaccctcagaccctgcagaagctgaaggttcctatcatcgactcggaagtctgcagccatctgtactggcggggagcaggacagggacccatcactgaggacatgctgtgtgccggctacttggagggggagcgggatgcttgtctgggcgactccgggggccccctcatgtgccaggtggacggcgcctggctgctggccggcatcatcagctggggcgagggctgtgccgagcgcaacaggcccggggtctacatcagcctctctgcgcaccgctcctgggtggagaagatcgtgcaaggggtgcagctccgcgggcgcgctcaggggggtggggccctcagggcaccgagccagggctctggggccgccgcgcgctcctagggcgcagcgggacgcggggctcggatctgaaaggcggccagatccacatctggatctggatctgcggcggcctcgggcggtttcccccgccgtaaataggctcatctacctctacctctgggggcccggacggctgctgcggaaaggaaaccccctccccgacccgcccgacggcctcaggccccgcctccaaggcatcaggccccgcccaacggcctcatgtccccgcccccacgacttccggccccgccccgggccccagcgcttttgtgtatataaatgttaatgatttttataggtatttgtaaccctgcccacatatcttatttattcctccaatttcaataaattatttattctccagtgaaaaa

SEQ ID NO: 229 - protein, 317 aa, Homo sapiens
  Brain serine proteinase 2
MVVSGAPPALGGGCLGTFTSLLLLASTAILNAARIPVPPACGKPQQLNRVVGGEDSTDSEWPWIVSIQKNGTHHCAGSLLTSRWVITAAHCFKDNLNKPYLFSVLLGAWQLGNPGSRSQKVGVAWVEPHPVYSWKEGACADIALVRLERSIQFSERVLPICLPDASIHLPPNTHCWISGWGSIQDGVPLPHPQTLQKLKVPIIDSEVCSHLYWRGAGQGPITEDMLCAGYLEGERDACLGDSGGPLMCQVDGAWLLAGIISWGEGCAERNRPGVYISLSAHRSWVEKIVQGVQLRGRAQGGGALRAPSQGSGAAARS

SEQ ID NO: 230 - DNA, 1184 bp, Homo sapiens
  Chymopasin
atctgccacgatgttgctgctcagcctgaccctaagcctggttctcctcggctcctcctggggctgcggcattcctgccatcaaaccggcactgagcttcagccagaggattgtcaacggggagaatgcagtgttgggctcctggccctggcaggtgtccctgcaggacagcagcggcttccacttctgcggtggttctctcatcagccagtcctgggtggtcactgctgcccactgcaatgtcagccctggccgccattttgttgtcctgggcgagtatgaccgatcatcaaacgcagagcccttgcaggttctgtccgtctctcgggccattacacaccctagctggaactctaccaccatgaacaatgacgtgacgctgctgaagctcgcctcgccagcccagtacacaacacgcatctcgccagtttgcctggcatcctcaaacgaggctctgactgaaggcctcacgtgtgtcaccaccggctggggtcgcctcagtggcgtgggcaatgtgacaccagcacatctgcagcaggtggctttgcccctggtcactgtgaatcagtgccggcagtactggggctcaagtatcactgactccatgatctgtgcaggtggcgcaggtgcctcctcgtgccagggtgactccggaggccctcttgtctgccagaagggaaacacatgggtgcttattggtattgtctcctggggcaccaaaaactgcaatgtgcgcgcacctgctgtgtatactcgagttagcaagttcagcacctggatcaaccaggtcatagcctacaactgagctcaccacaggccctccccagctcaacccattaaagacccaggccctgtcccatcatgcattcatgtctgtcttcctggctcaggagaaagaagaggctgttgagggtccgactccctacttggacttctggcacagaaggggctgagtgactccttgagtagcagtggctcttcctagagtagccatgccgaggccggggcccccacccctcctccagggcaaccccttggtcctacagcaagaagccagaactgttggaatgaatggcagccctccctggagaggcagcctgtttactgaatacagaggatacgtttacaaactgaatacgcataataaataactgcacattctccatccaaaaaaaaaaaaaaaa

SEQ ID NO: 231 - protein, 264 aa, Homo sapiens
  Chymopasin
MLLLSLTLSLVLLGSSWGCGIPAIKPALSFSQRIVNGENAVLGSWPWQVSLQDSSGFHFCGGSLISQSWVVTAAHCNVSPGRHFVVLGEYDRSSNAEPLQVLSVSRAITHPSWNSTTMNNDVTLLKLASPAQYTTRISPVCLASSNEALTEGLTCVTTGWGRLSGVGNVTPAHLQQVALPLVTVNQCRQYWGSSITDSMICAGGAGASSCQGDSGGPLVCQKGNTWVLIGIVSWGTKNCNVRAPAVYTRVSKFSTWINQVIAYN

SEQ ID NO: 232 - DNA, 1207 bp, Homo sapiens
  kallikrein 11 transcript variant 1
ggagtgcaggcttggaaagcaggagagctcagcctacgtctttaatcctcctgcccaccccttggattctgtctccactgggactcaagagaggaacctggggcccgctcctcccccctccaggccatgaggattctgcagttaatcctgcttgctctggcaacagggcttgtagggggagagaccaggatcatcaaggggttcgagtgcaagcctcactcccagccctggcaggcagccctgttcgagaagacgcggctactctgtggggcgacgctcatcgcccccagatggctcctgacagcagcccactgcctcaagccccgctacatagttcacctggggcagcacaacctccagaaggaggagggctgtgagcagacccggacagccactgagtccttcccccaccccggcttcaacaacagcctccccaacaaagaccaccgcaatgacatcatgctggtgaagatggcatcgccagtctccatcacctgggctgtgcgacccctcaccctctcctcacgctgtgtcactgctggcaccagctgcctcatttccggctggggcagcacgtccagcccccagttacgcctgcctcacaccttgcgatgcgccaacatcaccatcattgagcaccagaagtgtgagaacgcctaccccggcaacatcacagacaccatggtgtgtgccagcgtgcaggaagggggcaaggactcctgccagggtgactccgggggccctctggtctgtaaccagtctcttcaaggcattatctcctggggccaggatccgtgtgcgatcacccgaaagcctggtgtctacacgaaagtctgcaaatatgtggactggatccaggagacgatgaagaacaattagactggacccacccaccacagcccatcaccctccatttccacttggtgtttggttcctgttcactctgttaataagaaaccctaagccaagaccctctacgaacattctttgggcctcctggactacaggagatgctgtcacttaataatcaacctggggttcgaaatcagtgagacctggattcaaattctgccttgaaatattgtgactctgggaatgacaacacctggtttgttctctgttgtatccccagccccaaagacagctcctggccatatatcaaggtttcaataaatatttgctaaatgagtgaaaaaaaaaaaaaaaa

SEQ ID NO: 233 - protein, 250 aa, Homo sapiens
  kallikrein 11 isoform 1
MRILQLILLALATGLVGGETRIIKGFECKPHSQPWQAALFEKTRLLCGATLIAPRWLLTAAHCLKPRYIVHLGQHNLQKEEGCEQTRTATESFPHPGFNNSLPNKDHRNDIMLVKMASPVSITWAVRPLTLSSRCVTAGTSCLISGWGSTSSPQLRLPHTLRCANITIIEHQKCENAYPGNITDTMVCASVQEGGKDSCQGDSGGPLVCNQSLQGIISWGQDPCAITRKPGVYTKVCKYVDWIQETMKNN

SEQ ID NO: 234 - DNA, 1289 bp, Homo sapiens
  kallikrein 11 transcript variant 2
ctgccttgctccacacctggtcaggggagagaggggaggaaagccaagggaagggacctaactgaaaacaaacaagctgggagaagcaggaatctgcgctcgggttccgcagatgcagaggttgaggtggctgcgggactggaagtcatcgggcagaggtctcacagcagccaaggaacctggggcccgctcctcccccctccaggccatgaggattctgcagttaatcctgcttgctctggcaacagggcttgtagggggagagaccaggatcatcaaggggttcgagtgcaagcctcactcccagccctggcaggcagccctgttcgagaagacgcggctactctgtggggcgacgctcatcgcccccagatggctcctgacagcagcccactgcctcaagccccgctacatagttcacctggggcagcacaacctccagaaggaggagggctgtgagcagacccggacagccactgagtccttcccccaccccggcttcaacaacagcctccccaacaaagaccaccgcaatgacatcatgctggtgaagatggcatcgccagtctccatcacctgggctgtgcgacccctcaccctctcctcacgctgtgtcactgctggcaccagctgcctcatttccggctggggcagcacgtccagcccccagttacgcctgcctcacaccttgcgatgcgccaacatcaccatcattgagcaccagaagtgtgagaacgcctaccccggcaacatcacagacaccatggtgtgtgccagcgtgcaggaagggggcaaggactcctgccagggtgactccgggggccctctggtctgtaaccagtctcttcaaggcattatctcctggggccaggatccgtgtgcgatcacccgaaagcctggtgtctacacgaaagtctgcaaatatgtggactggatccaggagacgatgaagaacaattagactggacccacccaccacagcccatcaccctccatttccacttggtgtttggttcctgttcactctgttaataagaaaccctaagccaagaccctctacgaacattctttgggcctcctggactacaggagatgctgtcacttaataatcaacctggggttcgaaatcagtgagacctggattcaaattctgccttgaaatattgtgactctgggaatgacaacacctggtttgttctctgttgtatccccagccccaaagacagctcctggccatatatcaaggtttcaataaatatttgctaaatgagtgaaaaaaaaaaaaaaaa

SEQ ID NO: 235 - protein, 282 aa, Homo sapiens
  kallikrein 11 isoform 2
MQRLRWLRDWKSSGRGLTAAKEPGARSSPLQAMRILQLILLALATGLVGGETRIIKGFECKPHSQPWQAALFEKTRLLCGATLIAPRWLLTAAHCLKPRYIVHLGQHNLQKEEGCEQTRTATESFPHPGFNNSLPNKDHRNDIMLVKMASPVSITWAVRPLTLSSRCVTAGTSCLISGWGSTSSPQLRLPHTLRCANITIIEHQKCENAYPGNITDTMVCASVQEGGKDSCQGDSGGPLVCNQSLQGIISWGQDPCAITRKPGVYTKVCKYVDWIQETMKNN

SEQ ID NO: 236 - DNA, 802 bp, Homo sapiens
  anionic trypsin (II)
accaccatgaatctacttctgatccttacctttgttgcagctgctgttgctgccccctttgatgatgatgacaagatcgttgggggctacatctgtgaggagaattctgtcccctaccaggtgtccttgaattctggctaccacttctgcggtggctccctcatcagcgaacagtgggtggtgtcagcaggtcactgctacaagtcccgcatccaggtgagactgggagagcacaacatcgaagtcctggaggggaatgaacagttcatcaatgcagccaagatcatccgccaccccaaatacaacagccggactctggacaatgacatcctgctgatcaagctctcctcacctgccgtcatcaattcccgcgtgtccgccatctctctgcccactgcccctccagctgctggcaccgagtccctcatctccggctggggcaacactctgagttctggtgccgactacccagacgagctgcagtgcctggatgctcctgtgctgagccaggctgagtgtgaagcctcctaccctggaaagattaccaacaacatgttctgtgtgggcttcctcgagggaggcaaggattcctgccagggtgattctggtggccctgtggtctccaatggagagctccaaggaattgtctcctggggctatggctgtgcccagaagaacaggcctggagtctacaccaaggtctacaactatgtggactggattaaggacaccatagctgccaacagctaaagcccctggtccctctgcagtctctataccaataaagtgaccctgctctcac

SEQ ID NO: 237 - protein, 247 aa, Homo sapiens
  anionic trypsin (II)
MNLLLILTFVAAAVAAPFDDDDKIVGGYICEENSVPYQVSLNSGYHFCGGSLISEQWVVSAGHCYKSRIQVRLGEHNIEVLEGNEQFINAAKIIRHPKYNSRTLDNDILLIKLSSPAVINSRVSAISLPTAPPAAGTESLISGWGNTLSSGADYPDELQCLDAPVLSQAECEASYPGKITNNMFCVGFLEGGKDSCQGDSGGPVVSNGELQGIVSWGYGCAQKNRPGVYTKVYNYVDWIKDTIAANS

SEQ ID NO: 238 - DNA, 1475 bp, Homo sapiens
  LOC144757 peptidase
acctgccgccatcttgctcaccagcctccaaaatgcggctggggctcctgagcgtggcgctgttgtttgtggggagctctcacttatactcagaccactactcgccctctggaaggcacaggctcggcccctcgccggaaccggcggctagttcccagcaggctgaggccgtccgcaagaggctccggcggcggagggagggaggggcgcatgcaaaggattgtggaacagcaccgcttaaggatgtgttgcaagggtctcggattatagggggcaccgaagcacaagctggcgcatggccgtgggtggtgagcctgcagattaaatatggccgtgttcttgttcatgtatgtgggggaaccctagtgagagagaggtgggtcctcacagctgcccactgcactaaagacgctagcgatcctttaatgtggacagctgtgattggaactaataatatacatggacgctatcctcataccaagaagataaaaattaaagcaatcattattcatccaaacttcattttggaatcttatgtaaatgatattgcactttttcacttaaaaaaagcagtgaggtataatgactatattcagcctatttgcctaccttttgatgttttccaaatcctggacggaaacacaaagtgttttataagtggctggggaagaacaaaagaagaaggtaacgctacaaatattttacaagatgcagaagtgcattatatttctcgagagatgtgtaattctgagaggagttatgggggaataattcctaacacttcattttgtgcaggtgatgaagatggagcttttgatacttgcaggggtgacagtgggggaccattaatgtgctacttaccagaatataaaagattttttgtaatgggaattaccagttacggacatggctgtggtcgaagaggttttcctggtgtctatattgggccatccttctaccaaaagtggctgacagagcatttcttccatgcaagcactcaaggcatacttactataaatattttacgtggccagatcctcatagctttatgttttgtcatcttactagcaacaacataaagaaattctgaaggctttcatatctttattttgcattgtgtccctttctatgttctatataatgaacatcatttattcttctagcaattaattgcctacattagagatttcatgtgaacattttatgggctataagtattgtgacagatatacaattgtaattttggcactgaatcacatgtctccttgaaatatcttgattattttataatcataattctgtatctggaatactcatagagtttgtacaaaatattcagttaaacatatatgtgtataaatgccaaataatagtttataattaaaatgaaagctgtcatttggttaaattaataaaaattctttcttagattttattctaaaaaaaaaaaaaaaaaaagaaaaaaaaaaaaaaaa

SEQ ID NO: 239 - protein, 348 aa, Homo sapiens
  LOC144757 peptidase
MRLGLLSVALLFVGSSHLYSDHYSPSGRHRLGPSPEPAASSQQAEAVRKRLRRRREGGAHAKDCGTAPLKDVLQGSRIIGGTEAQAGAWPWVVSLQIKYGRVLVHVCGGTLVRERWVLTAAHCTKDASDPLMWTAVIGTNNIHGRYPHTKKIKIKAIIIHPNFILESYVNDIALFHLKKAVRYNDYIQPICLPFDVFQILDGNTKCFISGWGRTKEEGNATNILQDAEVHYISREMCNSERSYGGIIPNTSFCAGDEDGAFDTCRGDSGGPLMCYLPEYKRFFVMGITSYGHGCGRRGFPGVYIGPSFYQKWLTEHFFHASTQGILTINILRGQILIALCFVILLATT

SEQ ID NO: 240 - DNA, 1164 bp, Homo sapiens
  Mername-AA169 peptidase
atgattgccgttctcattgtgttgtccctgacagtggtggcagtgaccataggtctcctggttcacttcctagtatttgaccaaaaaaaggagtactatcatggctcctttaaaattttagatccacaaatcaataacaatttcggacaaagcaacacatatcaacttaaggacttacgagagacgaccgaaaatttggtggatgagatatttatagattcagcctggaagaaaaattatatcaagaaccaagtagtcagactgactccagaggaagatggtgtgaaagtagatgtcattatggtgttccagttcccctctactgaacaaagggcagtaagagagaagaaaatccaaagcatcttaaatcagaagataaggaatttaagagccttgccaataaatgcctcatcagttcaagttaatggttgtggtaaacgagttgttccattaaacgtcaacagaatagcatctggagtcattgcacccaaggcggcctggccttggcaagcttcccttcagtatgataacatccatcagtgtggggccaccttgattagtaacacatggcttgtcactgcagcacactgcttccagaagtataaaaatccacatcaatggactgttagttttggaacaaaaatcaaccctcccttaatgaaaagaaatgtcagaagatttattatccatgagaagtaccgctctgcagcaagagagtacgacattgctgttgtgcaggtctcttccagagtcaccttttcggatgacatacgccagatttgtttgccagaagcctctgcatccttccaaccaaatttgactgtccacatcacaggatttggagcactttactatggtggggaatcccaaaatgatctccgagaagccagagtgaaaatcataagtgatgatgtctgcaagcaaccacaggtgtatggcaatgatataaaacctggaatgttctgtgccggatatatggaaggaatttatgatgcctgcaggggtgattctgggggacctttagtcacaagggatctgaaagatacgtggtatctcattggaattgtaagctggggagataactgtggtcaaaaggacaagcctggagtctacacacaagtgacttattaccgaaactggattgcttcaaaaacaggcatctaa

SEQ ID NO: 241 - protein, 387 aa, Homo sapiens
  Mername-AA169 peptidase
MIAVLIVLSLTVVAVTIGLLVHFLVFDQKKEYYHGSFKILDPQINNNFGQSNTYQLKDLRETTENLVDEIFIDSAWKKNYIKNQVVRLTPEEDGVKVDVIMVFQFPSTEQRAVREKKIQSILNQKIRNLRALPINASSVQVNGCGKRVVPLNVNRIASGVIAPKAAWPWQASLQYDNIHQCGATLISNTWLVTAAHCFQKYKNPHQWTVSFGTKINPPLMKRNVRRFIIHEKYRSAAREYDIAVVQVSSRVTFSDDIRQICLPEASASFQPNLTVHITGFGALYYGGESQNDLREARVKIISDDVCKQPQVYGNDIKPGMFCAGYMEGIYDACRGDSGGPLVTRDLKDTWYLIGIVSWGDNCGQKDKPGVYTQVTYYRNWIASKTGI

SEQ ID NO: 242 - protein, 431 aa, Rattus norvegicus
  Mername-AA171 peptidase
MARGQPRRSEEPWTALRNRTECKTKIKLTKCGKITLGILTAVIAAVVIGLIAYFAACGKTPFYYHVSFKVNNIDYDSKFAKPYSQEYMDLNKRIVSLMNETFHESKLRKQYVKAHTVQVSKAKGKVVIHGVLKFKSCYKNNVEKFWDSVETILYQKLKSQTRLLIDSSSFKFSDIAMPIAEDLLNTCCGRRTITPGGHKVAGGQDAEEGEWPWQASLQQNNVHRCGATLISNSWLITAAHCFVRSANPKDWKVSFGFLLSKPQAQRAVKSIVIHENYSYPAHNNDIAVVRLSSPVLYENNIRRACLPEATQKFPPNSDVVVTGWGTLKSDGDSPNILQKGRVKIIDNKTCNSGKAYGGVITPGMLCAGFLEGRVDACQGDSGGPLVSEDSKGIWFLAGIVSWGDECALPNKPGVYTRVTHYRDWISSKTGL

SEQ ID NO: 243 - protein, 247 aa, Homo sapiens
  Mername-AA174 peptidase
MNPLLILAFVGAAVAVPFDDDDKIVGGYTCEENSVPYQVSLNSGSHFCGGSLISEQWVVSAGHCYKPHIQVRLGEHNIEVLEGNEQFINAAKIIRHPKYNRITLNNDIMLIKLSTPAVINAHVSTISLPTAPPAAGTECLISGWGNTLSSGADYPDELQCLDAPVLTQAKCKASYPLKITSKMFCVGFLEGGKDSCQGDSGGPVVCNGQLQGIVSWGYGCAQKRRPGVYTKVYNYVDWIKDTIAANS

SEQ ID NO: 244 - DNA, 1099 bp, Homo sapiens
  Mername-AA175 peptidase
gcacagcccagggccatgctcctgttctcagtgttgctgctcctgtccctggtcacgggaactcagctcggtccacggactcctctcccagaggctggagtggctatcctaggcagggctaggggagcccaccgccctcagccccgtcatccccccagcccagtcagtgaatgtggtgacagatctattttcgagggaagaactcggtattccagaatcacaggggggatggaggcggaggtgggtgagtttccgtggcaggtgagtattcaggcaagaagtgaacctttctgtggcggctccatcctcaacaagtggtggattctcactgcggctcactgcttatattccgaggagctgtttccagaagaactgagtgtcgtgctggggaccaacgacttaactagcccatccatggaaataaaggaggtcgccagcatcattcttcacaaagactttaagagagccaacatggacaatgacattgccttgctgctgctggcttcgcccatcaagctcgatgacctgaaggtgcccatctgcctccccacgcagcccggccctgccacatggcgcgaatgctgggtggcaggttggggccagaccaatgctgctgacaaaaactctgtgaaaacggatctgatgaaagtgccaatggtcatcatggactgggaggagtgttcaaagatgtttccaaaacttaccaaaaatatgctgtgtgccggatacaagaatgagagctatgatgcctgcaagggtgacagtggggggcctctggtctgcaccccagagcctggtgagaagtggtaccaggtgggcatcatcagctggggaaagagctgtggagagaagaacaccccagggatatacacctcgttggtgaactacaacctctggatcgagaaagtgacccagctagagggcaggcccttcaatgcagagaaaaggaggacttctgtcaaacagaaacctatgggctccccagtctcgggagtcccagagccaggcagccccagatcctggctcctgctctgtcccctgtcccatgtgttgttcagagctattttgtactgataataaaatagaggctattctttca

SEQ ID NO: 245 - protein, 352 aa, Homo sapiens
  Mername-AA175 peptidase
MLLFSVLLLLSLVTGTQLGPRTPLPEAGVAILGRARGAHRPQPRHPPSPVSECGDRSIFEGRTRYSRITGGMEAEVGEFPWQVSIQARSEPFCGGSILNKWWILTAAHCLYSEELFPEELSVVLGTNDLTSPSMEIKEVASIILHKDFKRANMDNDIALLLLASPIKLDDLKVPICLPTQPGPATWRECWVAGWGQTNAADKNSVKTDLMKVPMVIMDWEECSKMFPKLTKNMLCAGYKNESYDACKGDSGGPLVCTPEPGEKWYQVGIISWGKSCGEKNTPGIYTSLVNYNLWIEKVTQLEGRPFNAEKRRTSVKQKPMGSPVSGVPEPGSPRSWLLLCPLSHVLFRAILY

SEQ ID NO: 246 - DNA, 1927 bp, Homo sapiens
  stratum corneum chymotryptic enzyme transcript variant 1
tgccagcccaagtcggaacttggatcacatcagatcctctcgagctccagcaggagaggcccttcctcgcctggcagcccctgagcggctcagcagggcaccatggcaagatcccttctcctgcccctgcagatcttactgctatccttagccttggaaactgcaggagaagaagcccagggtgacaagattattgatggcgccccatgtgcaagaggctcccacccatggcaggtggccctgctcagtggcaatcagctccactgcggaggcgtcctggtcaatgagcgctgggtgctcactgccgcccactgcaagatgaatgagtacaccgtgcacctgggcagtgatacgctgggcgacaggagagctcagaggatcaaggcctcgaagtcattccgccaccccggctactccacacagacccatgttaatgacctcatgctcgtgaagctcaatagccaggccaggctgtcatccatggtgaagaaagtcaggctgccctcccgctgcgaaccccctggaaccacctgtactgtctccggctggggcactaccacgagcccagatgtgacctttccctctgacctcatgtgcgtggatgtcaagctcatctccccccaggactgcacgaaggtttacaaggacttactggaaaattccatgctgtgcgctggcatccccgactccaagaaaaacgcctgcaatggtgactcagggggaccgttggtgtgcagaggtaccctgcaaggtctggtgtcctggggaactttcccttgcggccaacccaatgacccaggagtctacactcaagtgtgcaagttcaccaagtggataaatgacaccatgaaaaagcatcgctaacgccacactgagttaattaactgtgtgcttccaacagaaaatgcacaggagtgaggacgccgatgacctatgaagtcaaatttgactttacctttcctcaaagatatatttaaaccaacctcatgccctgttgataaaccaatcaaattggtaaagacctaaaaccaaaacaaataaagaaacacaaaaccctcagtgctggagaagagtcagtgagaccagcactctcaaacactggaactggacgttcgtacagtctttacggaagacacttggtcaacgtacaccgagacccttattcaccacctttgacccagtaactctaatcttaggaagaacctactgaaacaaaaaaaatccaaaatgtagaacaagacttgaatttaccatgatattatttatcacagaaatgaagtgaaaccatcaaacatgttccaaaagtaccagatggcttaaataatagtctggcttggcacaacgatgttttttttctttgagacagagtctctgttgcttgggctgcaatgcagtgatgcaatcttggctcactgcaacctccgcctcctgggttcaagtgattctcgtgcttcagcctcccaagtacctgggactacaggtgtgcaccaccacaccaggctaattttttgtgtatttttactagagacagggtttcaccatgttggccagcgtggtcttgaacgcctgacctcagatgatccacccaccttggcctcccaaagtgctgggattacaggcatgagccaccacggccagcccacaatgatattacaaacctattaaaaatgatacttagacagaattgtcagtattattcaagaacatttaggctataggatgttaaatgacaaaaggaaggacaaaaatatatatgtatgtgaccctacccataaaaaatgaaatattcacagaatcagatctgaaaacacatgtcccagactgcatactggggtcgtcatgaggtgtctccttccttctgtgtacttttccttgaatgtgcacttttataacatgaaaaataaaggtggggaaaaaagtctgaaga

SEQ ID NO: 247 - protein, 253 aa, Homo sapiens
  stratum corneum chymotryptic enzyme transcript variant 1
MARSLLLPLQILLLSLALETAGEEAQGDKIIDGAPCARGSHPWQVALLSGNQLHCGGVLVNERWVLTAAHCKMNEYTVHLGSDTLGDRRAQRIKASKSFRHPGYSTQTHVNDLMLVKLNSQARLSSMVKKVRLPSRCEPPGTTCTVSGWGTTTSPDVTFPSDLMCVDVKLISPQDCTKVYKDLLENSMLCAGIPDSKKNACNGDSGGPLVCRGTLQGLVSWGTFPCGQPNDPGVYTQVCKFTKWINDTMKKHR

SEQ ID NO: 248 - DNA, 1927 bp, Homo sapiens
  stratum corneum chymotryptic enzyme transcript variant 2
ggagagggtgatgctggctccaagcctgactctgctctcgagagctccagcaggagaggcccttcctcgcctggcagcccctgagcggctcagcagggcaccatggcaagatcccttctcctgcccctgcagatcttactgctatccttagccttggaaactgcaggagaagaagcccagggtgacaagattattgatggcgccccatgtgcaagaggctcccacccatggcaggtggccctgctcagtggcaatcagctccactgcggaggcgtcctggtcaatgagcgctgggtgctcactgccgcccactgcaagatgaatgagtacaccgtgcacctgggcagtgatacgctgggcgacaggagagctcagaggatcaaggcctcgaagtcattccgccaccccggctactccacacagacccatgttaatgacctcatgctcgtgaagctcaatagccaggccaggctgtcatccatggtgaagaaagtcaggctgccctcccgctgcgaaccccctggaaccacctgtactgtctccggctggggcactaccacgagcccagatgtgacctttccctctgacctcatgtgcgtggatgtcaagctcatctccccccaggactgcacgaaggtttacaaggacttactggaaaattccatgctgtgcgctggcatccccgactccaagaaaaacgcctgcaatggtgactcagggggaccgttggtgtgcagaggtaccctgcaaggtctggtgtcctggggaactttcccttgcggccaacccaatgacccaggagtctacactcaagtgtgcaagttcaccaagtggataaatgacaccatgaaaaagcatcgctaacgccacactgagttaattaactgtgtgcttccaacagaaaatgcacaggagtgaggacgccgatgacctatgaagtcaaatttgactttacctttcctcaaagatatatttaaaccaacctcatgccctgttgataaaccaatcaaattggtaaagacctaaaaccaaaacaaataaagaaacacaaaaccctcagtgctggagaagagtcagtgagaccagcactctcaaacactggaactggacgttcgtacagtctttacggaagacacttggtcaacgtacaccgagacccttattcaccacctttgacccagtaactctaatcttaggaagaacctactgaaacaaaaaaaatccaaaatgtagaacaagacttgaatttaccatgatattatttatcacagaaatgaagtgaaaccatcaaacatgttccaaaagtaccagatggcttaaataatagtctggcttggcacaacgatgttttttttctttgagacagagtctctgttgcttgggctgcaatgcagtgatgcaatcttggctcactgcaacctccgcctcctgggttcaagtgattctcgtgcttcagcctcccaagtacctgggactacaggtgtgcaccaccacaccaggctaattttttgtgtatttttactagagacagggtttcaccatgttggccagcgtggtcttgaacgcctgacctcagatgatccacccaccttggcctcccaaagtgctgggattacaggcatgagccaccacggccagcccacaatgatattacaaacctattaaaaatgatacttagacagaattgtcagtattattcaagaacatttaggctataggatgttaaatgacaaaaggaaggacaaaaatatatatgtatgtgaccctacccataaaaaatgaaatattcacagaatcagatctgaaaacacatgtcccagactgcatactggggtcgtcatgaggtgtctccttccttctgtgtacttttccttgaatgtgcacttttataacatgaaaaataaaggtggggaaaaaagtctgaaga

SEQ ID NO: 249 - protein, 253 aa, Homo sapiens; identical to SEQ ID NO: 247
  stratum corneum chymotryptic enzyme

SEQ ID NO: 250 - DNA, 2800 bp, Homo sapiens
  trypsin-like enzyme, respiratory
atttgagtgggaatctcaaagcagttgagtaggcagaaaaaagaacctcttcattaaggattaaaatgtataggccagcacgtgtaacttcgacttcaagatttctgaatccatatgtagtatgtttcattgtcgtcgcaggggtagtgatcctggcagtcaccatagctctacttgtttactttttagcttttgatcaaaaatcttacttttataggagcagttttcaactcctaaatgttgaatataatagtcagttaaattcaccagctacacaggaatacaggactttgagtggaagaattgaatctctgattactaaaacattcaaagaatcaaatttaagaaatcagttcatcagagctcatgttgccaaactgaggcaagatggtagtggtgtgagagcggatgttgtcatgaaatttcaattcactagaaataacaatggagcatcaatgaaaagcagaattgagtctgttttacgacaaatgctgaataactctggaaacctggaaataaacccttcaactgagataacatcacttactgaccaggctgcagcaaattggcttattaatgaatgtggggccggtccagacctaataacattgtctgagcagagaatccttggaggcactgaggctgaggagggaagctggccgtggcaagtcagtctgcggctcaataatgcccaccactgtggaggcagcctgatcaataacatgtggatcctgacagcagctcactgcttcagaagcaactctaatcctcgtgactggattgccacgtctggtatttccacaacatttcctaaactaagaatgagagtaagaaatattttaattcataacaattataaatctgcaactcatgaaaatgacattgcacttgtgagacttgagaacagtgtcacctttaccaaagatatccatagtgtgtgtctcccagctgctacccagaatattccacctggctctactgcttatgtaacaggatggggcgctcaagaatatgctggccacacagttccagagctaaggcaaggacaggtcagaataataagtaatgatgtatgtaatgcaccacatagttataatggagccatcttgtctggaatgctgtgtgctggagtacctcaaggtggagtggacgcatgtcagggtgactctggtggcccactagtacaagaagactcacggcggctttggtttattgtggggatagtaagctggggagatcagtgtggcctgccggataagccaggagtgtatactcgagtgacagcctaccttgactggattaggcaacaaactgggatctagtgcaacaagtgcatccctgttgcaaagtctgtatgcaggtgtgcctgtcttaaattccaaagctttacatttcaactgaaaaagaaactagaaatgtcctaatttaacatcttgttacataaatatggtttaacaaacactgtttaacctttctttattattaaaggttttctattttctccagagaactatatgaatgttgcatagtactgtggctgtgtaacagaagaaacacactaaactaattacaaagttaacaatttcattacagttgtgctaaatgcccgtagtgagaagaacaggaaccttgagcatgtatagtagaggaacctgcacaggtctgatgggtcagaggggtcttctctgggtttcactgaggatgagaagtaagcaaactgtggaaacatgcaaaggaaaaagtgatagaataatattcaagacaaaaagaacagtatgaggcaagagaaataatatgtatttaaaatttttggttactcaatatcttatacttagtatgagtcctaaaattaaaaatgtgaaactgttgtactatacgtataacctaaccttaattattctgtaagaacatgcttccataggaaatagtggataattttcagctatttaaggcaaaagctaaaatagttcactcctcaactgagacccaaagaattatagatatttttcatgatgacccatgaaaaatatcactcatctacataaaggagagactatatctattttatagagaagctaagaaatatacctacacaaacttgtcaggtgctttacaactacatagtactttttaacaacaaaataataattttaagaatgaaaaatttaatcatcgggaagaacgtcccactacagacttcctatcactggcagttatatttttgagcgtaaaagggtcgtcaaacgctaaatctaagtaacgaattgaaagtttaaagagggggaagagttggtttgcaaaggaaaagtttaaatagcttaatatcaatagaatgatcctgaagacagaaaaaactttgtcactcttcctctctcattttctttctctctctctccccttctcatacacatgcctcccccaccaaagaatataatgtaaattaaatccactaaaatgtaatggcatgaaaatctctgtagtctgaatcactaatattcctgagtttttatgagctcctagtacagctaaagtttgcctatgcatgatcatctatgcgtcagagcttcctccttctacaagctaactccctgcatctgggcatcaggactgctccatacatttgctgaaaacttcttgtatttcctgatgtaaaattgtgcaaacacctacaataaagccatctacttttagggaaagggagttgaaaatgcaaccaactcttggcgaactgtacaaacaaatctttgctatactttatttcaaataaattctttttaaaataaaaaaaaaaaaaaaaaaa

SEQ ID NO: 251 - protein, 418 aa, Homo sapiens
  trypsin-like enzyme, respiratory
MYRPARVTSTSRFLNPYVVCFIVVAGVVILAVTIALLVYFLAFDQKSYFYRSSFQLLNVEYNSQLNSPATQEYRTLSGRIESLITKTFKESNLRNQFIRAHVAKLRQDGSGVRADVVMKFQFTRNNNGASMKSRIESVLRQMLNNSGNLEINPSTEITSLTDQAAANWLINECGAGPDLITLSEQRILGGTEAEEGSWPWQVSLRLNNAHHCGGSLINNMWILTAAHCFRSNSNPRDWIATSGISTTFPKLRMRVRNILIHNNYKSATHENDIALVRLENSVTFTKDIHSVCLPAATQNIPPGSTAYVTGWGAQEYAGHTVPELRQGQVRIISNDVCNAPHSYNGAILSGMLCAGVPQGGVDACQGDSGGPLVQEDSRRLWFIVGIVSWGDQCGLPDKPGVYTRVTAYLDWIRQQTGI

SEQ ID NO: 252 - DNA, 3149 bp, Homo sapiens
  Matripase
gacgcctgtgagacccgcgagcggcctcggggaccatggggagcgatcgggcccgcaagggcggagggggcccgaaggacttcggcgcgggactcaagtacaactcccggcacgagaaagtgaatggcttggaggaaggcgtggagttcctgccagtcaacaacgtcaagaaggtggaaaagcatggcccggggcgctgggtggtgctggcagccgtgctgatcggcctcctcttggtcttgctggggatcggcttcctggtgtggcatttgcagtaccgggacgtgcgtgtccagaaggtcttcaatggctacatgaggatcacaaatgagaattttgtggatgcctacgagaactccaactccactgagtttgtaagcctggccagcaaggtgaaggacgcgctgaagctgctgtacagcggagtcccattcctgggcccctaccacaaggagtcggctgtgacggccttcagcgagggcagcgtcatcgcctactactggtctgagttcagcatcccgcagcacctggtggaggaggccgagcgcgtcatggccgaggagcgcgtagtcatgctgcccccgcgggcgcgctccctgaagtcctttgtggtcacctcagtggtggctttccccacggactccaaaacagtacagaggacccaggacaacagctgcagctttggcctgcacgcccgcggtgtggagctgatgcgcttcaccacgcccggcttccctgacagcccctaccccgctcatgcccgctgccagtgggccctgcggggggacgccgactcagtgctgagcctcaccttccgcagctttgaccttgcgtcctgcgacgagcgcggcagcgacctggtgacggtgtacaacaccctgagccccatggagccccacgccctggtgcagttgtgtggcacctaccctccctcctacaacctgaccttccactcctcccagaacgtcctgctcatcacactgataaccaacactgagcggcggcatcccggctttgaggccaccttcttccagctgcctaggatgagcagctgtggaggccgcttacgtaaagcccaggggacattcaacagcccctactacccaggccactacccacccaacattgactgcacatggaacattgaggtgcccaacaaccagcatgtgaaggtgcgcttcaaattcttctacctgctggagcccggcgtgcctgcgggcacctgccccaaggactacgtggagatcaatggggagaaatactgcggagagaggtcccagttcgtcgtcaccagcaacagcaacaagatcacagttcgcttccactcagatcagtcctacaccgacaccggcttcttagctgaatacctctcctacgactccagtgacccatgcccggggcagttcacgtgccgcacggggcggtgtatccggaaggagctgcgctgtgatggctgggccgactgcaccgaccacagcgatgagctcaactgcagttgcgacgccggccaccagttcacgtgcaagaacaagttctgcaagcccctcttctgggtctgcgacagtgtgaacgactgcggagacaacagcgacgagcaggggtgcagttgtccggcccagaccttcaggtgttccaatgggaagtgcctctcgaaaagccagcagtgcaatgggaaggacgactgtggggacgggtccgacgaggcctcctgccccaaggtgaacgtcgtcacttgtaccaaacacacctaccgctgcctcaatgggctctgcttgagcaagggcaaccctgagtgtgacgggaaggaggactgtagcgacggctcagatgagaaggactgcgactgtgggctgcggtcattcacgagacaggctcgtgttgttgggggcacggatgcggatgagggcgagtggccctggcaggtaagcctgcatgctctgggccagggccacatctgcggtgcttccctcatctctcccaactggctggtctctgccgcacactgctacatcgatgacagaggattcaggtactcagaccccacgcagtggacggccttcctgggcttgcacgaccagagccagcgcagcgcccctggggtgcaggagcgcaggctcaagcgcatcatctcccaccccttcttcaatgacttcaccttcgactatgacatcgcgctgctggagctggagaaaccggcagagtacagctccatggtgcggcccatctgcctgccggacgcctcccatgtcttccctgccggcaaggccatctgggtcacgggctggggacacacccagtatggaggcactggcgcgctgatcctgcaaaagggtgagatccgcgtcatcaaccagaccacctgcgagaacctcctgccgcagcagatcacgccgcgcatgatgtgcgtgggcttcctcagcggcggcgtggactcctgccagggtgattccgggggacccctgtccagcgtggaggcggatgggcggatcttccaggccggtgtggtgagctggggagacggctgcgctcagaggaacaagccaggcgtgtacacaaggctccctctgtttcgggactggatcaaagagaacactggggtataggggccggggccacccaaatgtgtacacctgcggggccacccatcgtccaccccagtgtgcacgcctgcaggctggagactggaccgctgactgcaccagcgcccccagaacatacactgtgaactcaatctccagggctccaaatctgcctagaaaacctctcgcttcctcagcctccaaagtggagctgggaggtagaaggggaggacactggtggttctactgacccaactgggggcaaaggtttgaagacacagcctcccccgccagccccaagctgggccgaggcgcgtttgtgtatatctgcctcccctgtctgtaaggagcagcgggaacggagcttcggagcctcctcagtgaaggtggtggggctgccggatctgggctgtggggcccttgggccacgctcttgaggaagcccaggctcggaggaccctggaaaacagacgggtctgagactgaaaatggtttaccagctcccaggtgacttcagtgtgtgtattgtgtaaatgagtaaaacattttatttctttttaaaaaaaaaaa

SEQ ID NO: 253 - protein, 855 aa, Homo sapiens [sequence omitted]

SEQ ID NO: 254 - DNA, 1258 bp, Homo sapiens
  kallikrein hK13
tcaggccccgcccgccctgccctcccctcccgatcccggagccatgtggcccctggccctagtgatcgcctccctgaccttggccttgtcaggaggtgtctcccaggagtcttccaaggttctcaacaccaatgggaccagtgggtttctcccaggtggctacacctgcttcccccactctcagccctggcaggctgccctactagtgcaagggcggctactctgtgggggagtcctggtccaccccaaatgggtcctcactgccgcacactgtctaaaggaggggctcaaagtttacctaggcaagcacgccctagggcgtgtggaagctggtgagcaggtgagggaagttgtccactctatcccccaccctgaataccggagaagccccacccacctgaaccacgaccatgacatcatgcttctggagctgcagtccccggtccagctcacaggctacatccaaaccctgcccctttcccacaacaaccgcctaacccctggcaccacctgtcgggtgtctggctggggcaccaccaccagcccccaggtgaattaccccaaaactctacaatgtgccaacatccaacttcgctcagatgaggagtgtcgtcaagtctacccaggaaagatcactgacaacatgttgtgtgccggcacaaaagagggtggcaaagactcctgtgagggtgactctgggggccccctggtctgtaacagaacactgtatggcatcgtctcctggggagacttcccatgtgggcaacctgaccggcctggtgtctacacccgtgtctcaagatacgtcctgtggatccgtgaaacaatccgaaaatatgaaacccagcagcaaaaatggttgaagggcccacaataaaagttgagaaatgtaccggcttccatcctgtcaccatgacttcctcacatggtctgcttagcccttctctgctccttattcccagtgttccatttgaaccagtgatccatgtcctgaaaaatgctcaatctcagctaacattccatgtttcagaagcattcaggcactgccaggcttgcagtctcccagatgttgcatccctgaaacatctcaacaacctgaatgtcccaacccagacaatggcccaggtctctcaacttcatcagtgtggcttctatgagcccagatcaccacctgaacgttctgtctgtggcacattcttaaatatttccatcagcccatctcaacaatatatgtcctataaatggaccatccttgaca

SEQ ID NO: 255 - protein, 277 aa, Homo sapiens
  kallikrein hK13
MWPLALVIASLTLALSGGVSQESSKVLNTNGTSGFLPGGYTCFPHSQPWQAALLVQGRLLCGGVLVHPKWVLTAAHCLKEGLKVYLGKHALGRVEAGEQVREVVHSIPHPEYRRSPTHLNHDHDIMLLELQSPVQLTGYIQTLPLSHNNRLTPGTTCRVSGWGTTTSPQVNYPKTLQCANIQLRSDEECRQVYPGKITDNMLCAGTKEGGKDSCEGDSGGPLVCNRTLYGIVSWGDFPCGQPDRPGVYTRVSRYVLWIRETIRKYETQQQKWLKGPQ

SEQ ID NO: 256 - DNA, 1438 bp, Homo sapiens
  kallikrein hK9
catggaggaggaaggagatggcatggcttaccataaagaagcactggacgccgggtgcacgttccaggatccaggtgcccaggggtcatgaagctgggactcctctgtgctctgctctctctgctggcagggcatggctgggcagacacccgtgccatcggggccgaggaatgtcgccccaactcccagccttggcaggccggcctcttccaccttactcggctcttctgtggggcgaccctcatcagtgaccgctggctgctcacagctgcccactgccgcaagccgtatctgtgggtccgccttggagagcaccacctctggaaatgggagggtccggagcagctgttccgggttacggacttcttcccccaccctggcttcaacaaggacctcagcgccaatgaccacaatgatgacatcatgctgatccgcctgcccaggcaggcacgtctgagtcctgctgtgcagcccctcaacctcagccagacctgtgtctccccaggcatgcagtgtctcatctcaggctggggggccgtgtccagccccaaggcgctgtttccagtcacactgcagtgtgccaacatcagcatcctggagaacaaactctgtcactgggcataccctggacacatctcggacagcatgctctgtgcgggcctgtgggaggggggccgaggttcctgccagggtgactctgggggccccctggtttgcaatggaaccttggcaggcgtggtgtctgggggtgctgagccctgctccagaccccggcgccccgcagtctacaccagcgtatgccactaccttgactggatccaagaaatcatggagaactgagcccgcgcgccacgggggcaccttggaagaccaagagaggccgaagggcacggggtagggggttctcgtagggtcccagcctcaatggttcccgccctggacctccagctgccctgactcccctctggacactaagactccgcccctgaggctccgccccctcacgaggtcaagcaagacacagtcgcgccccctcggaacggagcagggacacgcccttcagagcccgtctctatgacgtcaccgacagccatcacctccttcttggaacagcacagcctgtggctccgccccaaggaaccacttacacaaaatagctccgcccctcggaactttgcccagtgggacttcccctcgggactccaccccttgtggccccgcctccttcaccagagatctcgcccctcgtgatgtcaggggcgcagtagctccgcccacgtggagctcgggcggtgtagagctcagccccttgtggccccgtcctgggcgtgtgctgggtttgaatcctggcggagacctggggggaaattgagggagggtctggatacctttagagccaatgcaacggatgatttttcagtaaacgcgggaaacctca

SEQ ID NO: 257 - protein, 250 aa, Homo sapiens
  kallikrein hK9
MKLGLLCALLSLLAGHGWADTRAIGAEECRPNSQPWQAGLFHLTRLFCGATLISDRWLLTAAHCRKPYLWVRLGEHHLWKWEGPEQLFRVTDFFPHPGFNKDLSANDHNDDIMLIRLPRQARLSPAVQPLNLSQTCVSPGMQCLISGWGAVSSPKALFPVTLQCANISILENKLCHWAYPGHISDSMLCAGLWEGGRGSCQGDSGGPLVCNGTLAGVVSGGAEPCSRPRRPAVYTSVCHYLDWIQEIMEN

SEQ ID NO: 258 - DNA, 3212 bp, Homo sapiens
  Mername-AA035 peptidase
cttgagccagacccagtccagctctggtgcctgccctctggtgcgagctgacctgagatgcacttccctcctctgtgagctgtctcggcacccacttgcagtcactgccgcctgatgttgttactcttccactccaaaaggatgcccgtggccgaggccccccaggtggctggcgggcagggggacggaggtgatggcgaggaagcggagccggaggggatgttcaaggcctgtgaggactccaagagaaaagcccggggctacctccgcctggtgcccctgtttgtgctgctggccctgctcgtgctggcttcggcgggggtgctactctggtatttcctagggtacaaggcggaggtgatggtcagccaggtgtactcaggcagtctgcgtgtactcaatcgccacttctcccaggatcttacccgccgggaatctagtgccttccgcagtgaaaccgccaaagcccagaagatgctcaaggagctcatcaccagcacccgcctgggaacttactacaactccagctccgtctattcctttggggagggacccctcacctgcttcttctggttcattctccaaatccccgagcaccgccggctgatgctgagccccgaggtggtgcaggcactgctggtggaggagctgctgtccacagtcaacagctcggctgccgtcccctacagggccgagtacgaagtggaccccgagggcctagtgatcctggaagccagtgtgaaagacatagctgcattgaattccacgctgggttgttaccgctacagctacgtgggccagggccaggtcctccggctgaaggggcctgaccacctggcctccagctgcctgtggcacctgcagggccccaaggacctcatgctcaaactccggctggagtggacgctggcagagtgccgggaccgactggccatgtatgacgtggccgggcccctggagaagaggctcatcacctcggtgtacggctgcagccgccaggagcccgtggtggaggttctggcgtcgggggccatcatggcggtcgtctggaagaagggcctgcacagctactacgaccccttcgtgctctccgtgcagccggtggtcttccaggcctgtgaagtgaacctgacgctggacaacaggctcgactcccagggcgtcctcagcaccccgtacttccccagctactactcgccccaaacccactgctcctggcacctcacggtgccctctctggactacggcttggccctctggtttgatgcctatgcactgaggaggcagaagtatgatttgccgtgcacccagggccagtggacgatccagaacaggaggctgtgtggcttgcgcatcctgcagccctacgccgagaggatccccgtggtggccacggccgggatcaccatcaacttcacctcccagatctccctcaccgggcccggtgtgcgggtgcactatggcttgtacaaccagtcggacccctgccctggagagttcctctgttctgtgaatggactctgtgtccctgcctgtgatggggtcaaggactgccccaacggcctggatgagagaaactgcgtttgcagagccacattccagtgcaaagaggacagcacatgcatctcactgcccaaggtctgtgatgggcagcctgattgtctcaacggcagcgacgaagagcagtgccaggaaggggtgccatgtgggacattcaccttccagtgtgaggaccggagctgcgtgaagaagcccaacccgcagtgtgatgggcggcccgactgcagggacggctcggatgaggagcactgtgactgtggcctccagggcccctccagccgcattgttggtggagctgtgtcctccgagggtgagtggccatggcaggccagcctccaggttcggggtcgacacatctgtgggggggccctcatcgctgaccgctgggtgataacagctgcccactgcttccaggaggacagcatggcctccacggtgctgtggaccgtgttcctgggcaaggtgtggcagaactcgcgctggcctggagaggtgtccttcaaggtgagccgcctgctcctgcacccgtaccacgaagaggacagccatgactacgacgtggcgctgctgcagctcgaccacccggtggtgcgctcggccgccgtgcgccccgtctgcctgcccgcgcgctcccacttcttcgagcccggcctgcactgctggattacgggctggggcgccttgcgcgagggcggccccatcagcaacgctctgcagaaagtggatgtgcagttgatcccacaggacctgtgcagcgaggtctatcgctaccaggtgacgccacgcatgctgtgtgccggctaccgcaagggcaagaaggatgcctgtcagggtgactcaggtggtccgctggtgtgcaaggcactcagtggccgctggttcctggcggggctggtcagctggggcctgggctgtggccggcctaactacttcggcgtctacacccgcatcacaggtgtgatcagctggatccagcaagtggtgacctgaggaactgcccccctgcaaagcagggcccacctcctggactcagagagcccagggcaactgccaagcagggggacaagtattctggcggggggtgggggagagagcaggccctgtggtggcaggaggtggcatcttgtctcgtccctgatgtctgctccagtgatggcaggaggatggagaagtgccagcagctgggggtcaagacgtcccctgaggacccaggcccacacccagcccttctgcctcccaattctctctcctccgtccccttcctccactgctgcctaatgcaaggcagtggctcagcagcaagaatgctggttctacatcccgaggagtgtctgaggtgcgccccactctgtacagaggctgtttgggcagccttgcctccagagagcagattccagcttcggaagcccctggtctaacttgggatctgggaatggaaggtgctcccatcggaggggaccctcagagccctggagactgccaggtgggcctgctgccactgtaagccaaaaggtggggaagtcctgactccagggtccttgccccacccctgcctgccacctgggccctcacagcccagaccctcactgggaggtgagctcagctgccctttggaataaagctgcctgatcaaaaaaaaaaaaaaaaaaaaa

SEQ ID NO: 259 - protein, 811 aa, Homo sapiens
  Mername-AA035 peptidase
MLLLFHSKRMPVAEAPQVAGGQGDGGDGEEAEPEGMFKACEDSKRKARGYLRLVPLFVLLALLVLASAGVLLWYFLGYKAEVMVSQVYSGSLRVLNRHFSQDLTRRESSAFRSETAKAQKMLKELITSTRLGTYYNSSSVYSFGEGPLTCFFWFILQIPEHRRLMLSPEVVQALLVEELLSTVNSSAAVPYRAEYEVDPEGLVILEASVKDIAALNSTLGCYRYSYVGQGQVLRLKGPDHLASSCLWHLQGPKDLMLKLRLEWTLAECRDRLAMYDVAGPLEKRLITSVYGCSRQEPVVEVLASGAIMAVVWKKGLHSYYDPFVLSVQPVVFQACEVNLTLDNRLDSQGVLSTPYFPSYYSPQTHCSWHLTVPSLDYGLALWFDAYALRRQKYDLPCTQGQWTIQNRRLCGLRILQPYAERIPVVATAGITINFTSQISLTGPGVRVHYGLYNQSDPCPGEFLCSVNGLCVPACDGVKDCPNGLDERNCVCRATFQCKEDSTCISLPKVCDGQPDCLNGSDEEQCQEGVPCGTFTFQCEDRSCVKKPNPQCDGRPDCRDGSDEEHCDCGLQGPSSRIVGGAVSSEGEWPWQASLQVRGRHICGGALIADRWVITAAHCFQEDSMASTVLWTVFLGKVWQNSRWPGEVSFKVSRLLLHPYHEEDSHDYDVALLQLDHPVVRSAAVRPVCLPARSHFFEPGLHCWITGWGALREGGPISNALQKVDVQLIPQDLCSEVYRYQVTPRMLCAGYRKGKKDACQGDSGGPLVCKALSGRWFLAGLVSWGLGCGRPNYFGVYTRITGVISWIQQVVT

SEQ ID NO: 260 - DNA, 3750 bp, Homo sapiens
  umbilical vein proteinase
gcgctgctcgccagcttgctcgcactcggctgtgcggcggggcaggcatgggagccgcgcgctctctcccggcgcccacacctgtctgagcggcgcagcgagccgcggcccgggcgggctgctcggcgcggaacagtgctcggcatggcagggattccagggctcctcttccttctcttctttctgctctgtgctgttgggcaagtgagcccttacagtgccccctggaaacccacttggcctgcataccgcctccctgtcgtcttgccccagtctaccctcaatttagccaagccagactttggagccgaagccaaattagaagtatcttcttcatgtggaccccagtgtcataagggaactccactgcccacttacgaagaggccaagcaatatctgtcttatgaaacgctctatgccaatggcagccgcacagagacgcaggtgggcatctacatcctcagcagtagtggagatggggcccaacaccgagactcagggtcttcaggaaagtctcgaaggaagcggcagatttatggctatgacagcaggttcagcatttttgggaaggacttcctgctcaactaccctttctcaacatcagtgaagttatccacgggctgcaccggcaccctggtggcagagaagcatgtcctcacagctgcccactgcatacacgatggaaaaacctatgtgaaaggaacccagaagcttcgagtgggcttcctaaagcccaagtttaaagatggtggtcgaggggccaacgactccacttcagccatgcccgagcagatgaaatttcagtggatccgggtgaaacgcacccatgtgcccaagggttggatcaagggcaatgccaatgacatcggcatggattatgattatgccctcctggaactcaaaaagccccacaagagaaaatttatgaagattggggtgagccctcctgctaagcagctgccagggggcagaattcacttctctggttatgacaatgaccgaccaggcaatttggtgtatcgcttctgtgacgtcaaagacgagacctatgacttgctctaccagcaatgcgatgcccagccaggggccagcgggtctggggtctatgtgaggatgtggaagagacagcagcagaagtgggagcgaaaaattattggcattttttcagggcaccagtgggtggacatgaatggttccccacaggatttcaacgtggctgtcagaatcactcctctcaaatatgcccagatttgctattggattaaaggaaactacctggattgtagggaggggtgacacagtgttccctcctggcagcaattaagggtcttcatgttcttattttaggagaggccaaattgttttttgtcattggcgtgcacacgtgtgtgtgtgtgtgtgtgtgtgtgtaaggtgtcttataatcttttacctatttcttacaattgcaagatgactggctttactatttgaaaactggtttgtgtatcatatcatatatcatttaagcagtttgaaggcatacttttgcatagaaataaaaaaaatactgatttggggcaatgaggaatatttgacaattaagttaatcttcacgtttttgcaaactttgatttttatttcatctgaacttgtttcaaagatttatattaaatatttggcatacaagagatatgaattcttatatgtgtgcatgtgtgttttcttctgagattcatcttggtggtgggtttttttgtttttttaattcagtgcctgatctttaatgcttccataaggcagtgttcccatttaggaactttgacagcatttgttaggcagaatattttggatttggaggcatttgcatggtagtctttgaacagtaaaatgatgtgttgactatactgatacacatattaaactataccttatagtaaaccagtatcccaagctgcttttagttccaaaaatagtttcttttccaaaggttgttgctctactttgtaggaagtctttgcatatggccctcccaactttaaagtcataccagagtggccaagagtgtttatcccaacccttccatttaacaggatttcactcacatttctggaactagctatttttcagaagacaataatcagggcttaattagaacaggctgtatttcctcccagcaaacagttgtggccacactaaaaacaatcatagcattttacccctggattatagcacatctcatgttttatcatttggatggagtaatttaaaatgaattaaattccagagaacaatggaagcattgcctggcagatgtcacaacagaataaccacttgtttggagcctggcacagtcctccagcctgatcaaaaattattctgcatagttttcagtgtgctttctgggagctatgtacttcttcaatttggaaacttttctctctcatttatagtgaaaatacttggaagttactttaagaaaaccagtgtggcctttttccctctagctttaaaagggccgcttttgctggaatgctctaggttatagataaacaattaggtataatagcaaaaatgaaaattggaagaatgcaaaatggatcagaatcatgccttccaataaaggcctttacacatgttttatcaatatgattatcaaatcacagcatatacagaaaagacttggacttattgtatgtttttattttatggctctcggcctaagcacttctttctaaatgtatcggagaaaaaatcaaatggactacaagcacgtgtttgctgtgcttgcaccccaggtaaacctgcattgtagcaatttgtaaggatattcagatggagcactgtcacttagacattctctgggggattttctgcttgtctttcttgagctttttggaaggataattctgataaggcactcaagaaacgtacaaccacagtgctttcttcaaatcatatgagaaatactatgcatagcaaggagatgcagagccgccaggaaaattctgagttccagcacaattttctttggaatctaacaggaatctagcctgaggaagaagggaggtctccatttctatgtctggtatttgggggttttgtttgtttttgctttagcttggtgaaaaaaagttcactgaacaccaagaccagaatggatttttttaaaaaaatagatgttccttttgtgaagcaccttgattccttgattttgattttttgcaaagttagacaatggcacaaagtcaaaatgaaatcaatgtttagttcacaagtagatgtaatttactaaagaatgatacacccatatgctatatacagcttaactcacagaactgtaaaagaaaattataaaataattcaacatgtccatctttttagtgataataaaagaaagcatggtattaaactatcatagaagtagacagaaaaagaaaaaaggactcatggcattattaatataattagtgctttacatgtgttagttatacatattagaagcatatttgcctagtaaggctagtagaaccacatttcccaaagtgtgctccttaaacactcatgccttatgattttctaccaaaagtaaaaagggttgtattaagtcagaggaagatgcctctccattttccctctctttatcagaggttcacatgcctgtctgcacattaaaagctctgggaagacctgttgtaaagggacaagttgaggttgtaaaatctgcatttaaataaacatctttgatcacaaaaaaaaaaaaaaaaaaaa

SEQ ID NO: 261 - protein, 383 aa, Homo sapiens
  umbilical vein proteinase
MAGIPGLLFLLFFLLCAVGQVSPYSAPWKPTWPAYRLPVVLPQSTLNLAKPDFGAEAKLEVSSSCGPQCHKGTPLPTYEEAKQYLSYETLYANGSRTETQVGIYILSSSGDGAQHRDSGSSGKSRRKRQIYGYDSRFSIFGKDFLLNYPFSTSVKLSTGCTGTLVAEKHVLTAAHCIHDGKTYVKGTQKLRVGFLKPKFKDGGRGANDSTSAMPEQMKFQWIRVKRTHVPKGWIKGNANDIGMDYDYALLELKKPHKRKFMKIGVSPPAKQLPGGRIHFSGYDNDRPGNLVYRFCDVKDETYDLLYQQCDAQPGASGSGVYVRMWKRQQQKWERKIIGIFSGHQWVDMNGSPQDFNVAVRITPLKYAQICYWIKGNYLDCREG

SEQ ID NO: 262 - protein, 26 aa, Homo sapiens
  LCLP proteinase (LCLP (N-terminus))
IIGGTESKPDSRPYMALLQIVEPAVH

SEQ ID NO: 263 - DNA, 2265 bp, Homo sapiens
  Spinesin
acgcgggatacagggaggggccatgtgcgaaccagggagacctcatcttccaaccaagcttgctgggcttgcatttaatcaatgcatggccagagaacaggagcggaacattgcctagtagaccctgaggctttacaacagtgctactgacccctatgagcctgatgctggatgaccaaccccctatggaggcccagtatgcagaggagggcccaggacctgggatcttcagagcagagcctggagaccagcagcatcccatttctcaggcggtgtgctggcgttccatgcgacgtggctgtgcagtgctgggagccctggggctgctggccggtgcaggtgttggctcatggctcctagtgctgtatctgtgtcctgctgcctctcagcccatttccgggaccttgcaggatgaggagataactttgagctgctcagaggccagcgctgaggaagctctgctccctgcactccccaaaacagtatctttcagaataaacagcgaagacttcttgctggaagcgcaagtgagggatcagccacgctggctcctggtctgccatgagggctggagccccgccctggggctgcagatctgctggagccttgggcatctcagactcactcaccacaagggagtaaacctcactgacatcaaactcaacagttcccaggagtttgctcagctctctcctagactgggaggcttcctggaggaggcgtggcagcccaggaacaactgcacttctggtcaagttgtttccctcagatgctctgagtgtggagcgaggcccctggcttcccggatagttggtgggcagtctgtggctcctgggcgctggccgtggcaggccagcgtggccctgggcttccggcacacgtgtgggggctctgtgctagcgccacgctgggtggtgactgctgcacattgtatgcacagtttcaggctggcccgcctgtccagctggcgggttcatgcggggctggtcagccacagtgccgtcaggccccaccaaggggctctggtggagaggattatcccacaccccctctacagtgcccagaatcatgactacgacgtcgccctcctgaggctccagaccgctctcaacttctcagacactgtgggcgctgtgtgcctgccggccaaggaacagcattttccgaagggctcgcggtgctgggtgtctggctggggccacacccaccctagccatacttacagctcggatatgctccaggacacggtggtgcccttgttcagcactcagctctgcaacagctcttgcgtgtacagcggagccctcaccccccgcatgctttgcgctggctacctggacggaagggctgatgcatgccagggagatagcgggggccccctagtgtgcccagatggggacacatggcgcctagtgggggtggtcagctgggggcgtgcgtgcgcagagcccaatcacccaggtgtctacgccaaggtagctgagtttctggactggatccatgacactgctcaggactccctcctctgagtcctgctgtttcctccagtctcactgcacaccactgcctcatgcttcctggggcctccagcagctccactaatggaggagaggcagtagcctccgacacagaacgcatggacctcctactactgtgtgtgaggaacagtcactacccactggccagccacccagccaacaggtctctcctcttgggccctgatttcagagtcctctttctcactagagactcaatgacagaagagaggctgggacttggttgggcatgctgtggttgctgagggatgagggggaggagagaggtaggagctggagatgaagagactgctagaagcagcaggaagcctgcccttctgccctctcccctccctgcccctgtgtgagtcttttagggagggtgactgggaggtgccccccgtcccacctttttcctgtgctctaggtgggctaagtgcctccctagaggactccatggctgagaggctcctgggcagatggggtcaaggctgggccagtcccagatgaagcctatgggagtcaggaccctctccactctccctctccactccccttcctgttctcacctggctgtggctggccctgtgtggggtgggtacactggaaaacaagaaggttggagttggtctaggacattggttttaaatgacagttctgtgaactggtccaaggaggttctgttattaaagtgatatatggtcttgaaaaaaaaaaaaaaaaaaaaaaa

SEQ ID NO: 264 - protein, 457 aa, Homo sapiens
  Spinesin
MSLMLDDQPPMEAQYAEEGPGPGIFRAEPGDQQHPISQAVCWRSMRRGCAVLGALGLLAGAGVGSWLLVLYLCPAASQPISGTLQDEEITLSCSEASAEEALLPALPKTVSFRINSEDFLLEAQVRDQPRWLLVCHEGWSPALGLQICWSLGHLRLTHHKGVNLTDIKLNSSQEFAQLSPRLGGFLEEAWQPRNNCTSGQVVSLRCSECGARPLASRIVGGQSVAPGRWPWQASVALGFRHTCGGSVLAPRWVVTAAHCMHSFRLARLSSWRVHAGLVSHSAVRPHQGALVERIIPHPLYSAQNHDYDVALLRLQTALNFSDTVGAVCLPAKEQHFPKGSRCWVSGWGHTHPSHTYSSDMLQDTVVPLFSTQLCNSSCVYSGALTPRMLCAGYLDGRADACQGDSGGPLVCPDGDTWRLVGVVSWGRACAEPNHPGVYAKVAEFLDWIHDTAQDSLL

SEQ ID NO: 265 - DNA, 1243 bp, Homo sapiens
  Mername-AA178 peptidase
atggctgcccctgcttccgtcatgggcccactcgggccctctgccctgggccttctgctgctgctcctggtggtggcccctccccgggtcgcagcattggtccacagacagccagagaaccagggaatctccctaactggcagcgtggcctgtggtcggcccagcatggaggggaaaatcctgggcggcgtccctgcgcccgagaggaagtggccgtggcaggtcagcgtgcactacgcaggcctccacgtctgcggcggctccatcctcaatgagtactgggtgctgtcagctgcgcactgctttcacagggacaagaatatcaaaatctatgacatgtacgtaggcctcgtaaacctcagggtggccggcaaccacacccagtggtatgaggtgaacagggtgatcctgcaccccacatatgagatgtaccaccccatcggaggtgacgtggccctggtgcagctgaagacccgcattgtgttttctgagtccgtgctcccggtttgccttgcaactccagaagtgaaccttaccagtgccaattgctgggctacgggatggggactagtctcaaaacaaggtgagacctcagacgagctgcaggagatgcagctcccgctgatcctggagccctggtgccacctgctctacggacacatgtcctacatcatgcccgacatgctgtgtgctggggacatcctgaatgctaagaccgtgtgtgagggcgactccgggggcccacttgtctgtgaattcaaccgcagctggttgcagattggaattgtgagctggggccgaggctgctccaaccctctgtaccctggagtgtatgccagtgtttcctatttctcaaaatggatatgtgataacatagaaatcacgcccactcctgctcagccagcccctgctctctctccagctctggggcccactctcagcgtcctaatggccatgctggctggctggtcagtgctgtgaggtcaggatacccactctaggattctcatggctgcacaccctgccccagcccagctgcctccagacccctaagcatctcctgtcctggcctctctgaagcagacaagggccacctatcccgggggtggatgctgagtccaggaggtgatgagcaagtgtacaaaagaaaaaagggaagggggagaggggctggtcagggagaacccagcttgggcagagtgcacctgagatttgataagatcattaaatatttacaaagcaa

SEQ ID NO: 266 - protein, 326 aa, Homo sapiens
  Mername-AA178 peptidase
MAAPASVMGPLGPSALGLLLLLLVVAPPRVAALVHRQPENQGISLTGSVACGRPSMEGKILGGVPAPERKWPWQVSVHYAGLHVCGGSILNEYWVLSAAHCFHRDKNIKIYDMYVGLVNLRVAGNHTQWYEVNRVILHPTYEMYHPIGGDVALVQLKTRIVFSESVLPVCLATPEVNLTSANCWATGWGLVSKQGETSDELQEMQLPLILEPWCHLLYGHMSYIMPDMLCAGDILNAKTVCEGDSGGPLVCEFNRSWLQIGIVSWGRGCSNPLYPGVYASVSYFSKWICDNIEITPTPAQPAPALSPALGPTLSVLMAMLAGWSVL

SEQ ID NO: 267 - DNA, 1695 bp, Homo sapiens
  Mername-AA180 peptidase
atgcttataagcaggaacaagctgattttactactaggaatagtcttttttgaacgaggtaaatctgcaactctttcgctccccaaagctcccagttgtgggcagagtctggttaaggtacagccttggaattattttaacattttcagtcgcattcttggaggaagccaagtggagaagggttcctatccctggcaggtatctctgaaacaaaggcagaagcatatttgtggaggaagcatcgtctcaccacagtgggtgatcacggcggctcactgcattgcaaacagaaacattgtgtctactttgaatgttactgctggagagtatgacttaagccagacagacccaggagagcaaactctcactattgaaactgtcatcatacatccacatttctccaccaagaaaccaatggactatgatattgcccttttgaagatggctggagccttccaatttggccactttgtggggcccatatgtcttccagagctgcgggagcaatttgaggctggttttatttgtacaactgcaggctggggccgcttaactgaaggtggcgtcctctcacaagtcttgcaggaagtgaatctgcctattttgacctgggaagagtgtgtggcagctctgttaacactaaagaggcccatcagtgggaagacctttctttgcacaggttttcctgatggagggagagacgcatgtcagggagattcaggaggttcactcatgtgccggaataagaaaggggcctggactctggctggtgtgacttcctggggtttgggctgtggtcgaggctggagaaacaatgtgaggaaaagtgatcaaggatcccctgggatcttcacagacattagtaaagtgcttccctggatccacgaacacatccaaactggtaatcggagaaagagctccagagcctggtgcagtgagcaggatgtcatagtcagcggggctgaggggaagctgcacttcccagaaagcctccacctatattatgagagcaagcaacggtgtgtctggaccctgctggtaccagaggaaatgcatgtgttgctcagtttttcccacctagatgttgagtcttgtcaccacagttacctgtcaatgtattctttagaagacagacccattggaaaattttgtggagaaagcctcccttcatccattcttattggctctaattctctaaggctgaaattcgtctctgatgccacagattatgcagctgggtttaatcttacctataaagctcttaaaccaaactacattcctgattcaggttgcagttacttaactgtcctttttgaagaaggtctcatacagagtctaaactatcctgaaaactacagtgacaaggctaactgtgactggatttttcaagcctccaaacatcacctaattaagctttcatttcagagtctggaaatagaagaaagtggagactgcacttccgactatgtgacagtgcacagcgatgtagaaaggaagaaggaaatagctcggctgtgtggctatgatgtccccacccctgtgctgagcccctccagcatcatgctcatcagcttccaatcagatgaaaacgggacctgcaggggctttcaggctacagtctccttcattcctaaagcaggtaagaagatagagttaccaactctttggttcccagttctaatccttgtgatgtga

SEQ ID NO: 268 - protein, 564 aa, Homo sapiens
  Mername-AA180 peptidase
MLISRNKLILLLGIVFFERGKSATLSLPKAPSCGQSLVKVQPWNYFNIFSRILGGSQVEKGSYPWQVSLKQRQKHICGGSIVSPQWVITAAHCIANRNIVSTLNVTAGEYDLSQTDPGEQTLTIETVIIHPHFSTKKPMDYDIALLKMAGAFQFGHFVGPICLPELREQFEAGFICTTAGWGRLTEGGVLSQVLQEVNLPILTWEECVAALLTLKRPISGKTFLCTGFPDGGRDACQGDSGGSLMCRNKKGAWTLAGVTSWGLGCGRGWRNNVRKSDQGSPGIFTDISKVLPWIHEHIQTGNRRKSSRAWCSEQDVIVSGAEGKLHFPESLHLYYESKQRCVWTLLVPEEMHVLLSFSHLDVESCHHSYLSMYSLEDRPIGKFCGESLPSSILIGSNSLRLKFVSDATDYAAGFNLTYKALKPNYIPDSGCSYLTVLFEEGLIQSLNYPENYSDKANCDWIFQASKHHLIKLSFQSLEIEESGDCTSDYVTVHSDVERKKEIARLCGYDVPTPVLSPSSIMLISFQSDENGTCRGFQATVSFIPKAGKKIELPTLWFPVLILVM

SEQ ID NO: 269 - DNA, 3420 bp, Homo sapiens
  Mername-AA182 peptidase
atgggcctgctggccagtgctggtttgttgctgttgctggtcatcggccaccccagaagcctaggactgaagtgtggaattcgcatggtcaacatgaaaagtaaggaacctgccgtgggatctagattcttctctagaattagtagttggagaaattcaacagtgactggacatccatggcaggtctccctaaaatcagatgagcaccacttctgtggaggaagcttgattcaagaagatcgggttgttacagcagcacactgcctggacagcctcagtgagaagcagctgaagaatataactgtgacttctggggagtacagcctctttcagaaggataagcaagaacagaatattcctgtctcaaaaattattacccatcctgaatacaacagccgtgaatatatgagtcctgatattgcactgctgtatctaaaacacaaagtcaagtttggaaatgctgttcagccaatctgtcttcctgacagcgatgataaagttgaaccaggaattctttgcttatccagtggatggggcaagatttccaaaacatcagaatattcaaatgtcctacaagaaatggaacttcccatcatggatgacagagcgtgtaatactgtgctcaagagcatgaacctccctcccctgggaaggaccatgctgtgtgctggcttccctgattggggaatggacgcctgccagggggactctggaggaccactggtttgtagaagaggtggtggaatctggattcttgctgggataacttcctgggtagctggttgtgctggaggttcagttcccgtaagaaacaaccatgtgaaggcatcacttggcattttctccaaagtgtctgagttgatggattttatcactcaaaacctgttcacaggtttggatcggggccaacccctctcaaaagtgggctcaaggtatataacaaaggccctgagttctgtccaagaagtgaatggaagccagagaggaaagggtattttagacatggaaaagcaagttggatgtgatcatgactatgtatctttacgatcaagcagtggagtgctttttaatcagagatctctcatggaagacgatggaaaacaaaacaaacgtgtctgtggaaaaatattgccttcaccattgctggcagagaccagtgaggccatggttccatttgtttctgatacagaagacagtggcagtggctttgagcttaccgttactgctgtacagaagtcagaagcagggtcaggttgtgggagtctggctatattggtagaagaagggacaaatcactctgccaagtatcctgatttgtatcccagtaacacaaggtgtcattggttcatttgtgctccagagaagcacattataaagttgacatttgaggactttgctgtcaaatttagtccaaactgtatttatgatgctgttgtgatttacggtgattctgaagaaaagcacaagttagctaaactttgtggaatgttgaccatcacttcaatattcagttctagtaacatgacggtgatatactttaaaagtgatggtaaaaatcgtttacaaggcttcaaggccagatttaccattttgccctcagagtctttaaacaaatttgaaccaaagttacctccccaaaacaatcctgtatctaccgtaaaagctattctgcatgatgtctgtggcatccctccatttagtccccagtggctttccagaagaatcgcaggaggggaagaagcctgcccccactgttggccatggcaggtgggtctgaggtttctaggcgattaccaatgtggaggtgccatcatcaacccagtgtggattctgaccgcagcccactgtgtgcaattgaagaataatccactctcctggactattattgctggggaccatgacagaaacctgaaggaatcaacagagcaggtgagaagggccaaacacataatagtgcatgaagactttaacacactaagttatgactctgacattgccctaatacaactaagctctcctctggagtacaactcggtggtgaggccagtatgtctcccacacagcgcagagcctctattttcctcggagatctgtgctgtgaccggatggggaagcatcagtgcagatggtggcctagcaagtcgcctacagcagattcaagtgcatgtgttagaaagagaggtctgtgaacacacttactattctgcccatccaggagggatcacagagaagatgatctgtgctggctttgcagcatctggagagaaagatttctgccagggagactctggtgggccactagtatgtagacatgaaaatggtccctttgtcctctatggcattgtcagctggggagctggctgtgtccagccatggaagccgggtgtatttgccagagtgatgatcttcttggactggatccaatcaaaaatcaatggtcctgcttcacttcagacaaataataaatgcaaaaccttaaaacaacaattgccaccacccacaccttcaccagacagtgcatcttggccaggttgttgctctgaagcagagctagaaaagcctagaggcttttttcccacaccacggtatctactggattatagaggaagactggaatgttcttgggtgctcagagtttcagcaagcagtatggcaaaatttaccattgagtatctgtcactcctggggtctcctgtgtgtcaagactcagttctaattatttatgaagaaagacacagtaagagaaagacggcaggtggattacatggaagaagactttactcaatgactttcatgagtcctggaccgctggtgagggtgacattccatgcccttgtacgaggtgcatttggtataagctatattgacttgaaagtcctaggtccaaaggacagtaaaataaccagactttcccaaagttcaaacagagagcacttggtcccttgtgaggatgttcttctgaccaagccagaagggatcatgcagatcccaagaaattctcacagaactactatggggtgccaatggagattagtagcccctttaaatcacatcattcagcttaatattattaacttcccgatgaagccaacaacttttgtctgtcatggtcatctgcgtgtttacgaaggatttggaccaggaaaaaaattaatagcttcattcgctggaactctggcaatgatactgacaaaagacatattaaaaagagaaaaactgaattttattaacacatatatcatgcatatatgggaaaattcagtgtatgataatgtaagaagtgttggaaaaagaaaacagaagaaatttgcatcaaatttaagttatagtatggaggctgagaagtccaggatccaggtgccagcagatttggtgcctgctaagggctcactttctggttcttaggcacagcccattctc

SEQ ID NO: 270 - protein, 1134 aa, Homo sapiens
  Mername-AA182 peptidase
MGLLASAGLLLLLVIGHPRSLGLKCGIRMVNMKSKEPAVGSRFFSRISSWRNSTVTGHPWQVSLKSDEHHFCGGSLIQEDRVVTAAHCLDSLSEKQLKNITVTSGEYSLFQKDKQEQNIPVSKIITHPEYNSREYMSPDIALLYLKHKVKFGNAVQPICLPDSDDKVEPGILCLSSGWGKISKTSEYSNVLQEMELPIMDDRACNTVLKSMNLPPLGRTMLCAGFPDWGMDACQGDSGGPLVCRRGGGIWILAGITSWVAGCAGGSVPVRNNHVKASLGIFSKVSELMDFITQNLFTGLDRGQPLSKVGSRYITKALSSVQEVNGSQRGKGILDMEKQVGCDHDYVSLRSSSGVLFNQRSLMEDDGKQNKRVCGKILPSPLLAETSEAMVPFVSDTEDSGSGFELTVTAVQKSEAGSGCGSLAILVEEGTNHSAKYPDLYPSNTRCHWFICAPEKHIIKLTFEDFAVKFSPNCIYDAVVIYGDSEEKHKLAKLCGMLTITSIFSSSNMTVIYFKSDGKNRLQGFKARFTILPSESLNKFEPKLPPQNNPVSTVKAILHDVCGIPPFSPQWLSRRIAGGEEACPHCWPWQVGLRFLGDYQCGGAIINPVWILTAAHCVQLKNNPLSWTIIAGDHDRNLKESTEQVRRAKHIIVHEDFNTLSYDSDIALIQLSSPLEYNSVVRPVCLPHSAEPLFSSEICAVTGWGSISADGGLASRLQQIQVHVLEREVCEHTYYSAHPGGITEKMICAGFAASGEKDFCQGDSGGPLVCRHENGPFVLYGIVSWGAGCVQPWKPGVFARVMIFLDWIQSKINGPASLQTNNKCKTLKQQLPPPTPSPDSASWPGCCSEAELEKPRGFFPTPRYLLDYRGRLECSWVLRVSASSMAKFTIEYLSLLGSPVCQDSVLIIYEERHSKRKTAGGLHGRRLYSMTFMSPGPLVRVTFHALVRGAFGISYIDLKVLGPKDSKITRLSQSSNREHLVPCEDVLLTKPEGIMQIPRNSHRTTMGCQWRLVAPLNHIIQLNIINFPMKPTTFVCHGHLRVYEGFGPGKKLIASFAGTLAMILTKDILKREKLNFINTYIMHIWENSVYDNVRSVGKRKQKKFASNLSYSMEAEKSRIQVPADLVPAKGSLSGS

SEQ ID NO: 271 - DNA, 2810 bp, Homo sapiens
  Mername-AA122 peptidase
acttggctctgcctccgctgactctagcgccatggcccggcacctgctcctcccccttgtgatgcttgtcatcagtcccatcccaggagccttccaggactcagctctcagtcctacccaggaagaacctgaagatctggactgcgggcgccctgagccctcggcccgcatcgtgggggggctcaaacgcgcagccgggcacctggccttggcaagtgagcctgcaccatggaggtggccacatctgcgggggctccctcatcgccccctcctgggtcctctccgctgctcactgtttcatgacgaatgggacgctggagcccgcggccgagtggtcggtactgctgggcgtgcactcccaggacgggcccctggacggcgcgcacacccgcgcagtggccgccatcgtggtgccggccaactacagccaagtggagctgggcgccgacctggccctgctgcgcctggcctcacccgccagcctgggccccgccgtgtggcctgtctgcctgccccgcgcctcacaccgcttcgtgcacggcaccgcctgctgggccaccggctggggagacgtccaggaggcagatcctctgcctctcccctgggtgctacaggaagtggagctaaggctgctgggcgaggccacctgtcaatgtctctacagccagcccggtcccttcaacctcactctccagatattgccagggatgctgtgtgctggctacccagagggccgcagggacacctgccagggcgactctggggggcccctggtctgtgaggaaggcggccgctggttccaggcaggaatcaccagctttggctttggctgtggacggagaaaccgccctggagttttcactgctgtggctacctatgaggcatggatacgggagcaggtgatgggttcagagcctgggcctgcctttcccacccagccccagaagacccagtcagatccccaggagcccagggaggagaactgcaccattgccctgcctgagtgcgggaaggccccgcggccaggggcctggccctgggaggcccaggtgatggtgccaggatccagaccctgccatggggcgctggtgtctgaaagctgggtcttggcacctgccagctgctttctggacccgaacagctccgacagcccaccccgcgacctcgacgcctggcgcgtgctgctgccctcgcgcccgcgcgcggagcgggtggcgcgcctggtgcagcacgagaacgcttcgtgggacaacgcctcggacctggcgctgctgcagctgcgcacgcccgtgaacctgagtgcggcttcgcggcccgtgtgcctaccccacccggaacactacttcctgcccgggagccgctgccgcctggcccgctggggccgcggggaacccgcgcttggcccaggcgcgctgctggaggcggagctgttaggcggctggtggtgccactgcctgtacggccgccagggggcggcagtaccgctgcccggagacccgccgcacgcgctctgccctgcctaccaggaaaaggaggaggtgggcagctgctggaatgactcgcgttggagccttttgtgccaggaggaggggacctggtttctggctggaatcagagactttcccagtggctgtctacgtccccgagccttcttccctctgcagactcatggcccatggatcagccatgtgactcggggagcctacctggaggaccagctagcctgggactggggccctgatggggaggagactgagacacagacttgtcccccacacacagagcatggtgcctgtggcctgcggctggaggctgctccagtgggggtcctgtggccctggctggcagaggtgcatgtggctggtgatcgagtctgcactgggatcctcctggccccaggctgggtcctggcagccactcactgtgtcctcaggccaggctctacaacagtgccttacattgaagtgtatctgggccgggcaggggccagctccctcccacagggccaccaggtatcccgcttggtcatcagcatccggctgccccagcacctgggactcaggccccccctggccctcctggagctgagctcccgggtggagccctccccatcagccctgcccatctgtctccacccggcgggtatccccccgggggccagctgctgggtgttgggctggaaagaaccccaggaccgagtccctgtggctgctgctgtctccatcttgacacaacgaatctgtgactgcctctatcagggcatcctgccccctggaaccctctgtgtcctgtatgcagaggggcaggagaacaggtgtgagatgacctcagcaccgcccctcctgtgccagatgacggaagggtcctggatcctcgtgggcatggctgttcaagggagccgggagctgtttgctgccattggtcctgaagaggcctggatctcccagacagtgggagaggccaacctcctgccccccagtggctccccacactggcccactggaggcagcaatctctgccccccagaactggccaaggcctcgggatccccgcatgcagtctacttcctgctcctgctgactctcctgatccagagctgaggggctagggtcccagcaccacttcccccttctccaccctctacttcccgcccagtggggctggaatgtggcccagccggctggaacctcaagggccccacccaccgagattgcagcggctctggctaattgggcctctgtgcccgggctattttgaacccaggaatccttgggggtggtgggaggagcggacaataaaggtgtaaacac

SEQ ID NO: 272 - protein, 766 aa, Homo sapiens
  Mername-AA122 peptidase
MTNGTLEPAAEWSVLLGVHSQDGPLDGAHTRAVAAIVVPANYSQVELGADLALLRLASPASLGPAVWPVCLPRASHRFVHGTACWATGWGDVQEADPLPLPWVLQEVELRLLGEATCQCLYSQPGPFNLTLQILPGMLCAGYPEGRRDTCQGDSGGPLVCEEGGRWFQAGITSFGFGCGRRNRPGVFTAVATYEAWIREQVMGSEPGPAFPTQPQKTQSDPQEPREENCTIALPECGKAPRPGAWPWEAQVMVPGSRPCHGALVSESWVLAPASCFLDPNSSDSPPRDLDAWRVLLPSRPRAERVARLVQHENASWDNASDLALLQLRTPVNLSAASRPVCLPHPEHYFLPGSRCRLARWGRGEPALGPGALLEAELLGGWWCHCLYGRQGAAVPLPGDPPHALCPAYQEKEEVGSCWNDSRWSLLCQEEGTWFLAGIRDFPSGCLRPRAFFPLQTHGPWISHVTRGAYLEDQLAWDWGPDGEETETQTCPPHTEHGACGLRLEAAPVGVLWPWLAEVHVAGDRVCTGILLAPGWVLAATHCVLRPGSTTVPYIEVYLGRAGASSLPQGHQVSRLVISIRLPQHLGLRPPLALLELSSRVEPSPSALPICLHPAGIPPGASCWVLGWKEPQDRVPVAAAVSILTQRICDCLYQGILPPGTLCVLYAEGQENRCEMTSAPPLLCQMTEGSWILVGMAVQGSRELFAAIGPEEAWISQTVGEANLLPPSGSPHWPTGGSNLCPPELAKASGSPHAVYFLLLLTLLIQS

SEQ ID NO: 273 - DNA, 1575 bp, Homo sapiens
  Cathepsin L
agaaccgcgacctccgcaaccttgagcggcatccgtggagtgcgcctgcagctacgaccgcagcaggaaagcgccgccggccaggcccagctgtggccggacagggactggaagagaggacgcggtcgagtaggtgtgcaccagccctggcaacgagagcgtctaccccgaactctgctggccttgaggtggggaagccggggagggcagttgaggaccccgcggaggcgcgtgactggttgagcgggcaggccagcctccgagccgggtggacacaggttttaaaacatgaatcctacactcatccttgctgccttttgcctgggaattgcctcagctactctaacatttgatcacagtttagaggcacagtggaccaagtggaaggcgatgcacaacagattatacggcatgaatgaagaaggatggaggagagcagtgtgggagaagaacatgaagatgattgaactgcacaatcaggaatacagggaagggaaacacagcttcacaatggccatgaacgcctttggagacatgaccagtgaagaattcaggcaggtgatgaatggctttcaaaaccgtaagcccaggaaggggaaagtgttccaggaacctctgttttatgaggcccccagatctgtggattggagagagaaaggctacgtgactcctgtgaagaatcagggtcagtgtggttcttgttgggcttttagtgctactggtgctcttgaaggacagatgttccggaaaactgggaggcttatctcactgagtgagcagaatctggtagactgctctgggcctcaaggcaatgaaggctgcaatggtggcctaatggattatgctttccagtatgttcaggataatggaggcctggactctgaggaatcctatccatatgaggcaacagaagaatcctgtaagtacaatcccaagtattctgttgctaatgacaccggctttgtggacatccctaagcaggagaaggccctgatgaaggcagttgcaactgtggggcccatttctgttgctattgatgcaggtcatgagtccttcctgttctataaagaaggcatttattttgagccagactgtagcagtgaagacatggatcatggtgtgctggtggttggctacggatttgaaagcacagaatcagataacaataaatattggctggtgaagaacagctggggtgaagaatggggcatgggtggctacgtaaagatggccaaagaccggagaaaccattgtggaattgcctcagcagccagctaccccactgtgtgagctggtggacggtgatgaggaaggacttgactggggatggcgcatgcatgggaggaattcatcttcagtctaccagcccccgctgtgtcggatacacactcgaatcattgaagatccgagtgtgatttgaattctgtgatattttcacactggtaaatgttacctctattttaattactgctataaataggtttatattattgattcacttactgactttgcattttcgtttttaaaaggatgtataaatttttacctgtttaaataaaatttaatttcaaatgt

SEQ ID NO: 274 - protein, 333 aa, Homo sapiens [sequence omitted]

SEQ ID NO: 275 - DNA, 1342 bp, Homo sapiens
  Cathepsin V
cggctgtaatctcagaggcttgtttgctgagggtgcctgcgcacgtgcgacggctgctggttttgaaacatgaatctttcgctcgtcctggctgccttttgcttgggaatagcctccgctgttccaaaatttgaccaaaatttggatacaaagtggtaccagtggaaggcaacacacagaagattatatggcgcgaatgaagaaggatggaggagagcagtgtgggaaaagaatatgaaaatgattgaactgcacaatggggaatacagccaagggaaacatggcttcacaatggccatgaatgcttttcctgacatgaccaatgaagaattcaggcagatgatgggttgctttcgaaaccagaaattcaggaaggggaaagtgttccgtgagcctctgtttcttgatcttcccaaatctgtggattggagaaagaaaggctacgtgacgccagtgaagaatcagaaacagtgtggttcttgttgggcttttagtgcgactggtgctcttgaaggacagatgttccggaaaactgggaaacttgtctcactgagcgagcagaatctggtggactgttcgcgtcctcaaggcaatcagggctgcaatggtggcttcatggctagggccttccagtatgtcaaggagaacggaggcctggactctgaggaatcctatccatatgtagcagtggatgaaatctgtaagtacagacctgagaattctgttgctaatgacactggcttcacagtggtcgcacctggaaaggagaaggccctgatgaaagcagtcgcaactgtggggcccatctccgttgctatggatgcaggccattcgtccttccagttctacaaatcaggcatttattttgaaccagactgcagcagcaaaaacctggatcatggtgttctggtggttggctacggctttgaaggagcaaattcgaataacagcaagtattggctcgtcaaaaacagctggggtccagaatggggctcgaatggctatgtaaaaatagccaaagacaagaacaaccactgtggaatcgccacagcagccagctaccccaatgtgtgagctgatggatggtgaggaggaaggacttaaggacagcatgtctggggaaattttatcttgaaactgaccaaacgcttattgtgtaagataaaccagttgaatcattgaggatccaagttgagattttaattctgtgacatttttacaagggtaaaatgttaccactactttaattattgttatacacagctttatgatatcaaagactcattgcttaattctaagacttttgaattttcattttttaaaaagatgtacaaaacagttt

SEQ ID NO: 276 - protein, 334 aa, Homo sapiens
  Cathepsin V
MNLSLVLAAFCLGIASAVPKFDQNLDTKWYQWKATHRRLYGANEEGWRRAVWEKNMKMIELHNGEYSQGKHGFTMAMNAFGDMTNEEFRQMMGCFRNQKFRKGKVFREPLFLDLPKSVDWRKKGYVTPVKNQKQCGSCWAFSATGALEGQMFRKTGKLVSLSEQNLVDCSRPQGNQGCNGGFMARAFQYVKENGGLDSEESYPYVAVDEICKYRPENSVANDTGFTVVAPGKEKALMKAVATVGPISVAMDAGHSSFQFYKSGIYFEPDCSSKNLDHGVLVVGYGFEGANSNNSKYWLVKNSWGPEWGSNGYVKIAKDKNNHCGIATAASYPNV

SEQ ID NO: 277 - DNA, 1661 bp, Homo sapiens
  Cathepsin K
attcggcacgagccgcaatcccgatggaataaatctagcacccctgatggtgtgcccacactttgctgccgaaacgaagccagacaacagatttccatcagcaggatgtgggggctcaaggttctgctgctacctgtggtgagctttgctctgtaccctgaggagatactggacacccactgggagctatggaagaagacccacaggaagcaatataacaacaaggtggatgaaatctctcggcgtttaatttgggaaaaaaacctgaagtatatttccatccataaccttgaggcttctcttggtgtccatacatatgaactggctatgaaccacctgggggacatgaccagtgaagaggtggttcagaagatgactggactcaaagtacccctgtctcattcccgcagtaatgacaccctttatatcccagaatgggaaggtagagccccagactctgtcgactatcgaaagaaaggatatgttactcctgtcaaaaatcagggtcagtgtggttcctgttgggcttttagctctgtgggtgccctggagggccaactcaagaagaaaactggcaaactcttaaatctgagtccccagaacctagtggattgtgtgtctgagaatgatggctgtggagggggctacatgaccaatgccttccaatatgtgcagaagaaccggggtattgactctgaagatgcctacccatatgtgggacaggaagagagttgtatgtacaacccaacaggcaaggcagctaaatgcagagggtacagagagatccccgaggggaatgagaaagccctgaagagggcagtggcccgagtgggacctgtctctgtggccattgatgcaagcctgacctccttccagttttacagcaaaggtgtgtattatgatgaaagctgcaatagcgataatctgaaccatgcggttttggcagtgggatatggaatccagaagggaaacaagcactggataattaaaaacagctggggagaaaactggggaaacaaaggatatatcctcatggctcgaaataagaacaacgcctgtggcattgccaacctggccagcttccccaagatgtgactccagccagccaaatccatcctgctcttccatttcttccacgatggtgcagtgtaacgatgcactttggaagggagttggtgtgctatttttgaagcagatgtggtgatactgagattgtctgttcagtttccccatttgtttgtgcttcaaatgatccttcctactttggttctctcctcccatgacctttttcactgtggccatcaggactttccctgacagctgtgtactcttaggctaagagatgtgactacagcctgcccctgactgtgttgtcccagggctgatgctgtacaggtacaggctggagattttcacataggttagattctcattcacgggactagttagctttaagcaccctagaggactagggtaatctgacttctcacttcctaagttcccttcaatatcctcaaggtagaaatgtctatgttttctactccaattcataaatctattcataagtctttggtacaagtttacatgataaaaagaaatgtgatttgtcttcccttctttgcacttttgaaataaagtatttatctcctgtctacagttta

SEQ ID NO: 278 - protein, 329 aa, Homo sapiens
  Cathepsin K
MWGLKVLLLPVVSFALYPEEILDTHWELWKKTHRKQYNNKVDEISRRLIWEKNLKYISIHNLEASLGVHTYELAMNHLGDMTSEEVVQKMTGLKVPLSHSRSNDTLYIPEWEGRAPDSVDYRKKGYVTPVKNQGQCGSCWAFSSVGALEGQLKKKTGKLLNLSPQNLVDCVSENDGCGGGYMTNAFQYVQKNRGIDSEDAYPYVGQEESCMYNPTGKAAKCRGYREIPEGNEKALKRAVARVGPVSVAIDASLTSFQFYSKGVYYDESCNSDNLNHAVLAVGYGIQKGNKHWIIKNSWGENWGNKGYILMARNKNNACGIANLASFPKM

SEQ ID NO: 279 - DNA, 1255 bp, Homo sapiens
  Cathepsin S
ctaaagatgaaacggctggtttgtgtgctcttggtgtgctcctctgcagtggcacagttgcataaagatcctaccctggatcaccactggcatctctggaagaaaacctatggcaaacaatacaaggaaaagaatgaagaagcagtacgacgtctcatctgggaaaagaatctaaagtttgtgatgcttcacaacctggagcattcaatgggaatgcactcatacgatctgggcatgaaccacctgggagacatgaccagtgaagaagtgatgtctttgacgagttccctgagagttcccagccagtggcagagaaatatcacatataagtcaaaccctaatcggatattgcctgattctgtggactggagagagaaagggtgtgttactgaagtgaaatatcaaggttcttgtggtgcttgctgggctttcagtgctgtgggggccctggaagcacagctgaagctgaaaacaggaaagctggtgactctcagtgcccagaacctggtggattgctcaactgaaaaatatggaaacaaaggctgcaatggtggcttcatgacaacggctttccagtacatcattgataacaagggcatcgactcagacgcttcctatccctacaaagccatggatcagaaatgtcaatatgactcaaaatatcgtgctgccacatgttcaaagtacactgaacttccttatgggagagaagatgtcctgaaagaagctgtggccaataaaggcccagtgtctgttggtgtagatgcgcgtcatccttctttcttcctctacagaagtggtgtctactatgaaccatcctgtactcagaatgtgaatcatggtgtacttgtggttggctatggtgatcttaatgggaaagaatactggcttgtgaaaaacagctggggccacaactttggtgaagaaggatatattcggatggcaagaaataaaggaaatcattgtgggattgctagctttccctcttacccagaaatctagaggatctctcctttttataacaaatcaagaaatatgaagcactttctcttaacttaatttttcctgctgtatccagaagaaataattgtgtcatgattaatgtgtatttactgtactaatagaaaatatagtttgaggccgggcactgtctggctcacgcctgtaatcccagtacttgggaggccaaggaggcatatcaacttgaggccaggagttaaagagcagcctggctaactgtgaaaccctctctact

SEQ ID NO: 280 - protein, 331 aa, Homo sapiens
  Cathepsin S
MKRLVCVLLVCSSAVAQLHKDPTLDHHWHLWKKTYGKQYKEKNEEAVRRLIWEKNLKFVMLHNLEHSMGMHSYDLGMNHLGDMTSEEVMSLMSSLRVPSQWQRNITYKSNPNRILPDSVDWREKGCVTEVKYQGSCGACWAFSAVGALEAQLKLKTGKLVTLSAQNLVDCSTEKYGNKGCNGGFMTTAFQYIIDNKGIDSDASYPYKAMDQKCQYDSKYRAATCSKYTELPYGREDVLKEAVANKGPVSVGVDARHPSFFLYRSGVYYEPSCTQNVNHGVLVVGYGDLNGKEYWLVKNSWGHNFGEEGYIRMARNKGNHCGIASFPSYPEI

SEQ ID NO: 281 - DNA, 1517 bp, Homo sapiens
  Cathepsin F
gaattccgggtctgttgggtccgggccgccggcttcgccctcgccatggcgccctggctgcagctcctgtcgctgctggggctgctcccgggcgcagtggccgcccccgcccagccccgagccgccagctttcaggcctgggggccgccgtccccggagctgctggcgcccacccgcttcgcgctggagatgttcaaccgcggccgggctgcggggacgcgggccgtgctgggccttgtgcgcggccgcgtccgccgggcgggtcaggggtcgctgtactccctggaggccaccctggaggagccaccctgcaacgaccccatggtgtgccggctccccgtgtccaagaaaaccctgctctgcagcttccaagtcctggatgagctcggaagacacgtgctgctgcggaaggactgtggcccagtggacaccaaggttccaggtgctggggagcccaagtcagccttcactcagggctcagccatgatttcttctctgtcccaaaaccatccagacaacagaaacgagactttcagctcagtcatttccctgttgaatgaggatcccctgtcccaggacttgcctgtgaagatggcttcaatcttcaagaactttgtcattacctataaccggacatatgagtcaaaggaagaagcccggtggcgcctgtccgtctttgtcaataacatggtgcgagcacagaagatccaggccctggaccgtgggacagctcagtatggagtcaccaagttcagtgatctcacagaggaggagttccgcactatctacctgaatactctcctgaggaaagagcctggcaacaagatgaagcaagccaagtctgtgggtgacctcgccccacctgaatgggactggaggagtaagggggctgtcacaaaagtcaaagaccagggcatgtgtggctcctgctgggccttctcagtcacaggcaatgtggagggccagtggtttctcaaccaggggaccctgctctccctctctgaacaggagctcttggactgtgacaagatggacaaggcctgcatgggcggcttgccctccaatgcctactcggccataaagaatttgggagggctggagacagaggatgactacagctaccagggtcacatgcagtcctgcaacttctcagcagagaaggccaaggtctacatcaatgactccgtggagctgagccagaacgagcagaagctggcagcctggctggccaagagaggcccaatctccgtggccatcaatgcctttggcatgcagttttaccgccacgggatctcccgccctctccggcccctctgcagcccttggctcattgaccatgcggtgttgcttgtgggctacggcaaccgctctgacgttcccttttgggccatcaagaacagctggggcactgactggggtgagaagggttactactacttgcatcgtgggtccggggcctgtggcgtgaacaccatggccagctcggcggtggtggactgaagaggggccccgaattc

SEQ ID NO: 282 - protein, 484 aa, Homo sapiens [sequence omitted]

SEQ ID NO: 283 - DNA, 2002 bp, Homo sapiens
  Cathepsin B
aattccgcggcaaccgctccggcaacgccaaccgctccgctgcgcgcaggctgggctgcaggctctcggctgcagcgctgggctggtgtgcagtggtgcgaccacggctcacggcagcctcagccacccagatgtaagcgatctggttcccacctcagccttccgagtagtggatctaggatctggcttccaacatgtggcagctctgggcctccctctgctgcctgctggtgttggccaatgcccggagcaggccctctttccatcccgtgtcggatgagctggtcaactatgtcaacaaacggaataccacgtggcaggccgggcacaacttctacaacgtggacatgagctacttgaagaggctatgtggtaccttcctgggtgggcccaagccaccccagagagttatgtttaccgaggacctgaagctgcctgcaagcttcgatgcacgggaacaatggccacagtgtcccaccatcaaagagatcagagaccagggctcctgtggctcctgctgggccttcggggctgtggaagccatctctgaccgcatctgcatccacaccaatgcgcacgtcagcgtggaggtgtcggcggaggacctgctcacctgctgtggcagcatgtgtggggacggctgtaatggtggctatcctgctgaagcttggaacttctggacaagaaaaggcctggtttctggtggcctctatgaatcccatgtagggtgcagaccgtactccatccctccctgtgagcaccacgtcaacggctcccggcccccatgcacgggggagggagatacccccaagtgtagcaagatctgtgagcctggctacagcccgacctacaaacaggacaagcactacggatacaattcctacagcgtctccaatagcgagaaggacatcatggccgagatctacaaaaacggccccgtggagggagctttctctgtgtattcggacttcctgctctacaagtcaggagtgtaccaacacgtcaccggagagatgatgggtggccatgccatccgcatcctgggctggggagtggagaatggcacaccctactggctggttgccaactcctggaacactgactggggtgacaatggcttctttaaaatactcagaggacaggatcactgcggaatcgaatcagaagtggtggctggaattccacgcaccgatcagtactgggaaaagatctaatctgccgtgggcctgtcgtgccagtcctgggggcgagatcggggtagaaagtcattttattctttaagttcacgtaagatacaagtttcaggcagggtctgaaggactggattggccaaagtcctccaaggagaccaagtcctggctacatcccagcctgtggttacagtgcagacaggccatgtgagccaccgctgccagcacagagcgtccttccccctgtagactagtgccgtgggagtacctgctgcccagctgctgtggccccctccgtgatccatccatctccagggagcaagacagagacgcaggatggaaagcggagttcctaacaggatgaaagttcccccatcagttcccccagtacctccaagcaagtagctttccacatttgtcacagaaatcagaggagagatggtgttgggagccctttggagaacgccagtctccaggtccccctgcatctatcgagtttgcaatgtcacaacctctctgatcttgtgctcagcatgattctttaatagaagttttatttttcgtgcactctgctaatcatgtgggtgagccagtggaacagcgggagcctgtgctggtttgcagattgcctcctaatgacgcggctcaaaaggaaaccaagtggtcaggagttgtttctgacccactgatctctactaccacaaggaaaatagtttaggagaaaccagcttttactgtttttgaaaaattacagcttcaccctgtcaagttaacaaggaatgcctgtgccaataaaaggtttctccaacttg

SEQ ID NO: 284 - protein, 339 aa, Homo sapiens
  Cathepsin B
MWQLWASLCCLLVLANARSRPSFHPLSDELVNYVNKRNTTWQAGHNFYNVDMSYLKRLCGTFLGGPKPPQRVMFTEDLKLPASFDAREQWPQCPTIKEIRDQGSCGSCWAFGAVEAISDRICIHTNAHVSVEVSAEDLLTCCGSMCGDGCNGGYPAEAWNFWTRKGLVSGGLYESHVGCRPYSIPPCEHHVNGSRPPCTGEGDTPKCSKICEPGYSPTYKQDKHYGYNSYSVSNSEKDIMAEIYKNGPVEGAFSVYSDFLLYKSGVYQHVTGEMMGGHAIRILGWGVENGTPYWLVANSWNTDWGDNGFFKILRGQDHCGIESEVVAGIPRTDQYWEKI

SEQ ID NO: 285 - DNA, 1292 bp, Carica papaya
  Papain
atccattcccacttaagaagtaaaaagatatagctagtgtcacaatggctatgataccttcaatttcaaagttgctttttgttgcaatatgtctttttgtttatatgggtttgtcatttggtgatttttctattgtgggttattctcaaaatgacttgacatccactgaaagacttattcagctatttgaatcgtggatgttgaagcacaataagatttataagaatattgatgaaaaaatctacagatttgaaatttttaaagataatcttaaatatattgatgagacaaataagaaaaataacagttattggcttggattaaatgtgtttgctgatatgagcaatgatgaattcaaagaaaagtatactggttctattgctggaaattatacaacaaccgaactatcatacgaagaagtgcttaatgatggtgatgtaaatatcccggagtatgtcgattggagacaaaaaggagctgtcactcctgtaaaaaatcagggttcttgtggtagttgttgggcattctcagctgttgtaactatagagggaataattaagattagaactgggaacttaaatgaatactcagagcaagaactgcttgactgcgacagacgtagctacgggtgcaatggaggttacccttggagtgcacttcaattagtggctcaatatggtattcactacagaaatacttacccatatgagggagtgcaacgttattgtcgctcaagggagaaaggtccttatgcagccaaaaccgatggggttcgacaagtgcaaccatataatgaaggggctctcttatattcaattgcaaaccaacctgtgagcgttgtccttgaagctgctggaaaagatttccaattatatagagggggaatatttgtggggccatgcggaaacaaagtagatcatgcagtcgcagcagttgggtatggaccaaattacatactcataaagaattcatggggtacaggatggggtgaaaatggatatataagaatcaaaagaggcactggaaactcctatggagtatgtggactttatacaagctcattctatcctgttaaaaactgatgagatcacggctttcataaaatcccttatatatatatatatatatagaacttgtatactcatcgtgtgttgaaataataaatgagaggattaataatttgtgtaatcctatatatcacagtttgttgtgacaaacttttgcatcgcttgttatattatttgtaataatgtttgttttgattgaataaacttttacatatacttttatgc

SEQ ID NO: 286 - protein, 345 aa, Carica papaya
  Papain
MAMIPSISKLLFVAICLFVYMGLSFGDFSIVGYSQNDLTSTERLIQLFESWMLKHNKIYKNIDEKIYRFEIFKDNLKYIDETNKKNNSYWLGLNVFADMSNDEFKEKYTGSIAGNYTTTELSYEEVLNDGDVNIPEYVDWRQKGAVTPVKNQGSCGSCWAFSAVVTIEGIIKIRTGNLNEYSEQELLDCDRRSYGCNGGYPWSALQLVAQYGIHYRNTYPYEGVQRYCRSREKGPYAAKTDGVRQVQPYNEGALLYSIANQPVSVVLEAAGKDFQLYRGGIFVGPCGNKVDHAVAAVGYGPNYILIKNSWGTGWGENGYIRIKRGTGNSYGVCGLYTSSFYPVKN

SEQ ID NO: 287 - DNA, 1845 bp, Trypanosoma cruzi
  Cruzain (Cruzapain)
atgtctggctgggcgcgtgcgctgttgctcgcggccgtcctggtcgtcatggcgtgcctcgtccccgcggcgacggcgagcctgcatgcggaggagacgctgacgtcgcaattcgcagaattcaagcagaagcatggcagggtgtacgagagcgccgcggaggaggcgttccgcctgagcgtgttcagggagaacctgtttcttgcgaggctgcacgccgcggcaaacccacacgcgaccttcggcgtcacgcccttctcggacctcacgcgcgaggaattccggtcccgctaccacaacggcgcggcgcactttgcggcggcgcaggagcgcgcgagagtgccggtgaaggtggaggtagttggcgcgcccgcggcagtggattggcgtgcgagaggcgccgtgacagccgtcaaggaccagggccaatgcggttcgtgctgggccttctccgccattggcaacgttgagtgccagtggtttcttgccggccacccgctgacgaacctgtcggagcagatgctcgtgtcgtgcgacaaaacggactctggctgcagtggtggcctgatgaacaacgcctttgagtggattgtgcaggagaataacggcgccgtgtacacggaggacagctacccttatgcgtcgggcgaggggatatcgccgccgtgcacgacgtcaggccacacggtgggtgccacgattaccggtcacgttgaattacctcaggacgaggcccaaatagccgcatggcttgcagtcaatggcccggttgccgttgccgtcgacgccagcagctggatgacctacacgggcggcgttatgacgagctgcgtctccgagcagctggatcacggcgttcttctcgtcggctacaatgacagcgccgcagtgccgtactggatcatcaagaactcgtggaccacgcagtggggcgaggaaggctacatccgcattgcaaagggctcgaaccagtgccttgtcaaggaggaggcgagctccgcggtggtcggtggtcccggacccactcccgagccaaccaccacgacaaccacaagtgccccaggaccgtccccatcgtactttgtgcagatgtcctgcactgacgctgcgtgcattgtcgggtgcgagaacgtgacgttaccgaccggtcagtgtctcctgaccaccagcggcgtctctgccattgtcacgtgcggtgctgagactctcacagaagaagtcttccttacgagtacgcactgcagcggcccatcggtgaggtcctctgttcctctcaacaaatgcaaccggcttttaagaggctccgttgagttcttctgcggctccagctccagtggccgactggccgacgtggacaggcagcgtcgccatcagccataccacagccgtcatcgccgcctctgagggcactctttgtttctgatgctgccttttctctcattttacttttttattattattgagcgagcgtcggtgctgcggcacactgggcaaataagtcccagtggagtggattgtttattgatttgctccatgtatgtgttttcttttttgtgcacaactgcaaatatgtgtccgcgatcgacgtctcagccacgcgtgtgttttttctattatatgcttctgttgagcgcccgagcattccccactgtggctgaacccaccgccgtccccgactgtcacccgaccatgcggggcggggtggcgtggcaacgctcctttgccgcggcgtgcacatacacgcgcgcatgcttcttctctccacgtcaacgccgacaccaccacagtctgaaggtgacgctgttgaaggcacacaaggaaggaaacacacccacacaagcagta

SEQ ID NO: 288 - protein, 467 aa, Trypanosoma cruzi
  Cruzain (Cruzapain)
MSGWARALLLAAVLVVMACLVPAATASLHAEETLTSQFAEFKQKHGRVYESAAEEAFRLSVFRENLFLARLHAAANPHATFGVTPFSDLTREEFRSRYHNGAAHFAAAQERARVPVKVEVVGAPAAVDWRARGAVTAVKDQGQCGSCWAFSAIGNVECQWFLAGHPLTNLSEQMLVSCDKTDSGCSGGLMNNAFEWIVQENNGAVYTEDSYPYASGEGISPPCTTSGHTVGATITGHVELPQDEAQIAAWLAVNGPVAVAVDASSWMTYTGGVMTSCVSEQLDHGVLLVGYNDSAAVPYWIIKNSWTTQWGEEGYIRIAKGSNQCLVKEEASSAVVGGPGPTPEPTTTTTTSAPGPSPSYFVQMSCTDAACIVGCENVTLPTGQCLLTTSGVSAIVTCGAETLTEEVFLTSTHCSGPSVRSSVPLNKCNRLLRGSVEFFCGSSSSGRLADVDRQRRHQPYHSRHRRL

SEQ ID NO: 289 - protein, 379 aa, Bacillus licheniformis
  Subtilisin Carlsberg precursor	S08.001
MMRKKSFWLGMLTAFMLVFTMAFSDSASAAQPAKNVEKDYIVGFKSGVKTASVKKDIIKESGGKVDKQFRIINAAKAKLDKEALKEVKNDPDVAYVEEDHVAHALAQTVPYGIPLIKADKVQAQGFKGANVKVAVLDTGIQASHPDLNVVGGASFVAGEAYNTDGNGHGTHVAGTVAALDNTTGVLGVAPSVSLYAVKVLNSSGSGTYSGIVSGIEWATTNGMDVINMSLGGPSGSTAMKQAVDNAYARGVVVVAAAGNSGSSGNTNTIGYPAKYDSVIAVGAVDSNSNRASFSSVGAELEVMAPGAGVYSTYPTSTYATLNGTSMASPHVAGAAALILSKHPNLSASQVRNRLSSTATYLGSSFYYGKGLINVEAAAQ

SEQ ID NO: 290 - DNA, 1588 bp, Bacillus licheniformis
  Subtilisin Carlsberg precursor	S08.001
gatcgacaagaccgcaacctccttcgacaaaaaatgatctcttaaaataaatgaatagtattttcataaaatgaatcagatggagcaatctcctgtcattcgcggccctcgggacctctttccctgccaggctgaagcggtctattcatactttcgaactgaacatttttctaaaacagttattaataaccaaaaaattttaaattggtcctccaaaaaaataggcctaccatataattcattttttttctataataaattaacagaataattggaatagattatattatccttctatttaaattattctgaataaagaggaggagagtgagtaatgatgaggaaaaagagtttttggcttgggatgctgacggccttcatgctcgtgttcacgatggcattcagcgattccgcttctgctgctcaaccggcgaaaaatgttgaaaaggattatattgtcggatttaagtcaggagtgaaaaccgcatctgtcaaaaaggacatcatcaaagagagcggcggaaaagtggacaagcagtttagaatcatcaacgcggcaaaagcgaagctagacaaagaagcgcttaaggaagtcaaaaatgatccggatgtcgcttatgtggaagaggatcatgtggcccatgccttggcgcaaaccgttccttacggcattcctctcattaaagcggacaaagtgcaggctcaaggctttaagggagcgaatgtaaaagtagccgtcctggatacaggaatccaagcttctcatccggacttgaacgtagtcggcggagcaagctttgtggctggcgaagcttataacaccgacggcaacggacacggcacacatgttgccggtacagtagctgcgcttgacaatacaacgggtgtattaggcgttgcgccaagcgtatccttgtacgcggttaaagtactgaattcaagcggaagcggaacttacagcggcattgtaagcggaatcgagtgggcgacgacaaacggcatggatgttatcaacatgagtcttggaggaccatcaggctcaacagcgatgaaacaggcggttgacaatgcatatgcaagaggggttgtcgttgtggcggctgctgggaacagcggatcttcaggaaacacgaatacaatcggctatcctgcgaaatacgactctgtcatcgcagttggcgcggtagactctaacagcaacagagcttcattttccagcgtcggagcagagcttgaagtcatggctcctggcgcaggcgtgtacagcacttacccaaccagcacttatgcaacattgaacggaacgtcaatggcttctcctcatgtagcgggagcagcagctttgatcttgtcaaaacatccgaacctttcagcttcacaagtccgcaaccgtctctccagtacggcgacttatttgggaagctccttctactatggaaaaggtctgatcaatgtcgaagctgccgctcaataacatattctaacaaatggcatatagaaaaagctagtgtttttagcactagctttttcttcattcagttgaagactgttcaatattttgaatccgttccattatggtcggatggcc

SEQ ID NO: 291 - protein, 275 aa, Bacillus pumilus
  Subtilisin (Alkaline mesentericopeptidase) S08.002
AQSVPYGISQIKAPALHSQGYTGSNVKVAVIDSGIDSSHPDLNVRGGASFVPSETNPYQDGSSHGTHVAGTIAALNNSIGVLGVAPSSALYAVKVLDSTGSGQYSWIINGIEWAISNNMDVINMSLGGPTGSTALKTVVDKAVSSGIVVAAAAGNEGSSGSTSTVGYPAKYPSTIAVGAVNSANQRASFSSAGSELDVMAPGVSIQSTLPGGTYGAYNGTSMATPHVAGAAALILSKHPTWTNAQVRDRLESTATYLGSSFYYGKGLINVQAAAQ

SEQ ID NO: 292 - protein, 269 aa, Bacillus lentus
  Subtilisin Savinase (Alkaline protease)  S08.003
AQSVPWGISRVQAPAAHNRGLTGSGVKVAVLDTGISTHPDLNIRGGASFVPGEPSTQDGNGHGTHVAGTIAALNNSIGVLGVAPSAELYAVKVLGASGSGSVSSIAQGLEWAGNNGMHVANLSLGSPSPSATLEQAVNSATSRGVLVVAASGNSGAGSISYPARYANAMAVGATDQNNNRASFSQYGAGLDIVAPGVNVQSTYPGSTYASLNGTSMATPHVAGAAALVKQKNPSWSNVQIRNHLKNTATSLGSTNLYGSGLVNAEAATR

SEQ ID NO: 293 - protein, 279 aa, Thermoactinomyces vulgaris [sequence omitted]

SEQ ID NO: 294 - protein, 401 aa, Bacillus sp. AK1
  Thermophilic serine proteinase precursor (Ak.1 protease)  S08.009
MKFKAIVSLSLAVSMSLFPFLVEAASNDGVESPKTVSEINVSHEKGAYVQGEVIVQFKEQVNAEEKAKALKEVGATAVPDNDRVKSKFNVLKVGNVEAVVKALNNNPLVEYAEPNYLFNAAWTPNDTYYQGYQYGPQNTYTDYAWDVTKGSSGQEIAVIDTGVDYTHPDLDGKVIKGYDFVDNDYDPMDLNNHGTHVAGIAAAETNNATGIAGMAPNTRILAVRALDRNGSGTLSDIADAIIYAADSGAEVINLSLGCDCHTTTLENAVNYAWNKGSVVVAAAGNNGSSTTFEPASYENVIAVGAVDQYDRLASFSNYGTWVDVVAPGVDIVSTITGNRYAYMSGTSMASPHVAGLAALLASQGRNNIEIRQAIEQTADKISGTGTYFKYGRINSYNAVTY

SEQ ID NO: 295 - DNA, 1591 bp, Bacillus sp
  Thermophilic serine proteinase precursor (Ak.1 protease)	 S08.009
gcatgctacgattaaatatctaagaatccccaattaaataccattattttacaaaattatattatattaaaataaatgtcgagatttttgagaaaaaatttttcattcctcccccttcctcaacgtaaaattaataccgcaattccatttaaagggggaatatttccatgaagtttaaagcgattgtaagtttatccctcgctgtttccatgtcactttttccattccttgtggaagcagcctctaatgatggggtagaatctccaaaaaccgtttccgaaattaacgtgtctcatgaaaaaggagcatatgtccagggagaagtcattgtccaattcaaagaacaagtaaatgctgaagaaaaggcaaaggcattaaaagaagttggggcaacggcggttccagataatgatcgagttaaatctaaatttaatgtactaaaagtaggaaatgtggaagctgttgtgaaagcattaaataataacccgttagtagaatacgcagagccaaactatttatttaatgcagcttggactccaaatgatacgtactatcagggttatcaatatggtccacaaaatacgtataccgactatgcttgggatgttacaaaaggcagtagcggtcaagagattgctgttattgatacaggtgtagattatacacatcctgatttagatggaaaagtcatcaaaggatatgatttcgtagataatgattacgacccaatggatttgaataatcatggtacgcacgtagctggaatagcagctgcggaaacaaacaatgctacaggtattgccggcatggccccaaacacaagaattttggctgtgcgcgctttagatcgaaatggcagtggtactctaagtgatattgccgatgcgatcatttatgctgctgattcaggcgctgaagtcattaacctgtcacttggttgtgattgtcatacaaccacattggagaatgctgtaaactatgcatggaataagggttctgtagtagttgccgcagccggaaataatggatcctctacaacatttgaaccggcttcttatgaaaatgtaattgcagttggcgcagtagatcaatatgatcggttagcatcattctcgaactatggaacatgggtagatgtcgtagctccaggtgtagacattgtctcaactattactggtaaccgatatgcctatatgtcgggcacttccatggcatcccctcatgtagccggtcttgcagccttactagcgagtcaaggacggaataacatagaaattcgtcaagccatcgagcaaacagcagacaaaatctccggaactggaacatacttcaaatatggaagaatcaattcttataatgctgtaacatattaaatagatttaaataacgacaccgtgccaacgccaagggcacggtgtcttaattcaagctttttggaaaatcacgacatacaaattatgtaagaaagcttattctcccataggaattgaagaggaaaaccaatattattcttttatctcagcaaaaataaaaaaactgccaaatggcagactctaactaactattttttgcttccttctttctgctgcag

SEQ ID NO: 296 - protein, 1167 aa, Streptococcus pyogenes
  C5a peptidase precursor (SCP) S08.020
MRKKQKLPFDKLAIALMSTSILLNAQSDIKANTVTEDTPVTEQAVETPQPTAVSEEVPSSKETKTPQTPDDAEETIADDANDLAPQAPAKTADTPATSKATIRDLNDPSQVKTLQEKAGKGAGTVVAVIDAGFDKNHEAWRLTDKTKARYQSKEDLEKAKKEHGITYGEWVNDKVAYYHDYSKDGKTAVDQEHGTHVSGILSGNAPSETKEPYRLEGAMPEAQLLLMRVEIVNGLADYARNYAQAIRDAVNLGAKVINMSFGNAALAYANLPDETKKAFDYAKSKGVSIVTSAGNDSSFGGKTRLPLADHPDYGVVGTPAAADSTLTVASYSPDKQLTETAMVKTDDQQDKEMPVLSTNRFEPNKAYDYAYANRGMKEDDFKDVKGKIALIERGDIDFKDKVANAKKAGAVGVLIYDNQDKGFPIELPNVDQMPAAFISRKDGLLLKDNPQKTITFNATPKVLPTASGTKLSRFSSWGLTADGNIKPDIAAPGQDILSSVANNKYAKLSGTSMSAPLVAGIMGLLQKQYETQYPDMTPSERLDLAKKVLMSSATALYDEDEKAYFSPRQQGAGAVDAKKASAATMYVTDKDNTSSKVHLNNVSDKFEVTVTVHNKSDKPQELYYQATVQTDKVDGKHFALAPKVLYEASWQKITIPANSSKQVTVPIDASRFSKDLLAQMKNGYFLEGFVRFKQDPTKEELMSIPYIGFRGDFGNLSAVEKPIYDSKDGSSYYHEANSDAKDQLDGDGLQFYALKNNFTALTTESNPWTIIKAVKEGVENIEDIESSEITETIFAGTFAKQDDDSHYYIHRHANGEPYAAISPNGDGNRDYVQFQGTFLRNAKNLVAEVLDKEGNVVWTSEVTEQVVKNYNNDLASTLGSTRFEKTRWDGKDKDGKVVANGTYTYRVRYTPISSGAKEQHTDFDVIVDNTTPEVATSATFSTEDRRLTLASKPKTSQPVYRERIAYTYMDEDLPTTEYISPNEDGTFTLPEEAETMEGATVPLKMSDFTYVVEDMAGNITYTPVTKLLEGHSNKPEQDGSGQTPDKKPEAKPEQDGSDQAPDKKPEAKPEQDGSGQTPDKKPETKPEKDSSGQTPGKTPQKGQPSRTLEKRSSKRALATKASTRDQLPTTNDKDTNRLHLLKLVMTTFFFGLVAHIFKTKRQKETKK

SEQ ID NO: 297 - DNA, 4637 bp, Streptococcus pyogenes
  C5a peptidase precursor (SCP) S08.020
cctgtattgatacatagcccaagaatatgcgtaaaaatagactcaatcaagcctttttcttgaaagcgacgggaataatttttgccataggttgtgaaatgtggcaccttgtcatccaaagtcaaacctaaaaaccagcgataggcagtattcacttcaatatccttgatggtctgacgcatggaacgaatgccataaaagcactgaatcagagggattttaaccaacatgacaggatcaaggctagggcgaccattatcagacgaataggtgtcttctactaggtcatagatgaagtcgaagtcaatcacagcttccacttagcgcaggaaatgttcatcaggcactaactggtcaagggtatagaaaccgtactgattgcggttatagtcaggtttttctttgtgtaacataggagaacctcacaagtcctttttcttatattatactcctaaatatcatgaaaagcccctagaaaagcgattctaaggactttgtcttcagtctgaagagagaaccgatcggttctctcttttatgtctaaaagaatgaggataaggaggtcacaaactaaacaactcttaaaaagctgacctttactaataatcgtcttttttttataataaagatgttagtaatataattgataaatgagatacatttaatcattatggcaaaagcaagaaaaatagctgtatcatatgcaaataacccctgtttgctctttaaaaaagatattatccttatttctccacgcacagatggacagctaggagagaatcgtttgattctctcttttcttaatggtcataaagacaaagtctctcatcaggaaaggacgacacattgcgtaaaaaacaaaaattaccatttgataaacttgccattgcgctcatgtctacgagcatcttgctcaatgcacaatcagacattaaagcaaatactgtgacagaagacactcctgttaccgaacaagccgtagaaaccccacaaccaacagcggtttctgaggaagtaccatcatcaaaggaaaccaaaaccccacaaactcctgatgacgcagaagaaacaatagcagatgacgctaatgatctagcccctcaagctcctgctaaaactgctgatacaccagcaacctcaaaagcgactattagggatttgaacgacccttctcaggtcaaaaccctgcaggaaaaagcaggcaagggagctgggactgttgttgcagtgattgatgctggttttgataaaaatcatgaagcgtggcgcttaacagacaaaaccaaagcacgttaccaatcaaaagaagatcttgaaaaagctaaaaaagagcacggtattacctatggcgagtgggtcaatgataaggttgcttattaccacgactatagcaaagatggtaaaaccgctgtcgatcaagagcacggcacacacgtgtcagggatcttgtcaggaaatgctccatctgaaacgaaagaaccttaccgcctagaaggtgcgatgcctgaggctcaattgcttttgatgcgtgtcgaaattgtaaatggactagcagactatgctcgtaactacgctcaagctatcagagatgctgtcaacttgggagctaaggtgattaatatgagctttggtaatgctgcactagcctacgctaacctcccagacgaaaccaaaaaagcctttgactatgccaaatcaaaaggtgttagcattgtgacctcagctggtaatgatagtagctttgggggcaagacccgtctacctctagcagatcatcctgattatggggtggttgggacacctgcagcggcagactcaacattgacagttgcttcttacagcccagataaacagctcactgaaactgctatggtcaaaacagacgatcagcaagataaagaaatgcctgttctttcaacaaaccgttttgagccaaacaaggcttacgactatgcttatgctaatcgtgggatgaaagaggatgattttaaggatgtcaaaggcaagattgcccttattgaacgtggcgatattgatttcaaagataaggttgcaaacgctaaaaaagctggtgctgtaggggtcttgatctatgacaatcaggacaagggcttcccgattgaattgccaaatgttgatcagatgcctgcggcctttatcagtcgaaaagacggtctcttattaaaagacaatccccaaaaaaccatcaccttcaatgcgacacctaaggtattgccaacagcaagtggcaccaaactaagccgcttctcaagctggggtctgacagctgacggcaatattaagccagatattgcagcacccggccaagatattttgtcatcagtggctaacaacaagtatgccaaactttctggaactagtatgtctgcgccattagtagcgggtatcatgggactgttgcaaaagcaatatgagacacagtatcctgatatgacaccatcagagcgtcttgatttagctaaaaaagtattgatgagctcagcaactgccttatatgatgaagatgaaaaagcttatttttctcctcgccaacaaggagcaggagcggtcgatgctaaaaaagcttcagcagcaacgatgtatgtgacagataaggataatacctcaagcaaggttcacctgaacaatgtttctgataaatttgaagtaacagtaactgttcacaacaaatctgataaacctcaagagttgtattaccaagcaactgttcaaacagataaagtagatggaaaacactttgccttggctcctaaagtattgtatgaggcatcatggcaaaaaatcacaattccagccaatagcagcaaacaagtcaccgttccaatcgatgctagtcgatttagcaaggacttgcttgcccaaatgaaaaatggctatttcttagaaggttttgttcgtttcaaacaagatcctacaaaagaagagcttatgagcattccatatattggtttccgaggtgattttggcaatctgtcagccgtagaaaaaccaatctatgatagcaaagacggtagcagctactatcatgaagcaaatagtgatgccaaagaccaattagatggtgatggattacagttttacgctctgaaaaacaactttacagcacttaccacagagtctaacccatggacgattattaaggctgtcaaagaaggggttgaaaacatagaggatatcgaatcttcagagatcacagaaaccatttttgcaggtacttttgcaaaacaagacgatgatagccactactatatccaccgtcacgctaatggcgagccatatgctgcgatctctccaaatggggacggtaacagagattatgtccaattccaaggtactttcttgcgtaatgctaaaaaccttgtggctgaagtcttggacaaagaaggaaatgttgtttggacaagtgaggtaaccgagcaagttgttaaaaactacaacaatgacttggcaagcacacttggttcaacccgttttgaaaaaactcgttgggacggtaaagataaagacggcaaagttgttgctaacggaacctacacctatcgtgtccgctacactccgattagttcaggtgcaaaagaacaacacactgattttgatgtgattgtagacaatacgacacctgaagtcgcaacatcggcaacattctcaacagaagatcgtcgtttgacacttgcatctaaaccaaaaaccagccaaccggtttaccgtgagcgtattgcttacacttatatggatgaggatctgccaacaacagagtatatttctccaaatgaagatggtacctttactcttcctgaagaggctgaaacaatggaaggcgctactgttccattgaaaatgtcagactttacttatgttgttgaagatatggctggtaatatcacttatacaccagtgactaagctattggagggccactctaataagccagaacaagacggttcaggtcaaacaccagataaaaaaccagaagctaaaccagaacaagacggttcagatcaagcaccagacaaaaaaccagaagctaaaccagaacaagacggttcaggtcaaacaccagataaaaaaccagaaactaaaccagaaaaagatagttcaggtcaaacaccaggtaaaactcctcaaaaaggtcaaccttctcgtactctagagaaacgctcttctaagcgtgctttagctacaaaagcatcaacaagagatcagttaccaacgactaatgacaaggatacaaatcgtttacatctccttaagttagttatgaccactttcttctttggattagtagctcatatctttaaaacaaaacgccaaaaagaaactaaaaaatagtattacttaaactgataagagcttatttaatagagggaaccaatttggttctctctatttttttagatgtgctgcctcatcaaaaagaagttaggacaaatagctgtcaacaattgccttttgcttatcttttcagttgctgtgataaaagatggcacgccaaacgcatgaagaaacttttgttttcagaaaactagattcataatgacaaaatcaatcaaagtagtacactatagatgaggtgactacgatgattgattttattatttctcaaccattctatttct

SEQ ID NO: 298 - protein, 699 aa, Fervidobacterium pennivorans
  fervidolysin  S08.020
MRKVLLIASIVALILALFSCANPSFEPRSKAKDLASLPEIKSQGYHILFGELRDGEYTEGKILVGYNDRSEVDKIVKAVNGKVVLELPQIKVVSIKLNGMTVKQAYDKIKALALKGIRYVEPSYKRELIKPTVVKPNPDMYKIRKPGLNSTARDYGEELSNELWGLEAIGVTQQLWEEASGTNIIVAVVDTGVDGTHPDLEGQVIAGYRPAFDEELPAGTDSSYGGSHGTHVAGTIAAKKDGKGIVGVAPGAKIMPIVIFDDPALVGGNGYVGDDYVAAGIIWATDHGAKVMNHSWGGWGYSYTMKEAFDYAMEHGVVMVVSAGNNTSDSHHQYPAGYPGVIQVAALDYYGGTFRVAGFSSRSDGVSVGAPGVTILSTVPGEDSIGYEGHNENVPATNGGTYDYYQGTSMAAPHVTGVVAVLLQKFPNAKPWQIRKLLENTAFDFNGNGWDHDTGYGLVKLDAALQGPLPTQGGVEEFQVVVTDAKGNFGVPTVFVSMMRDNGSCYYAKTGPDGIARFPHIDSGTYDIFVGGPDHWDRALAPYDGESIPGGYAIALRMAEERQASFVGFGVSPDATQLNVNFNSTLQVKFSTNLSTLKDPQFVVVDPLLRGVYGRVAYARNQTYDLSLLSGQISFGIQTLLPAATDITIQGTVTLNGEDIPVYGVLKAGTTWTIIDDFGGLNLGTDSQPIYVWWTIFGQ

SEQ ID NO: 299 - DNA, 2227 bp, Fervidobacterium pennivorans
  fervidolysin	S08.020
aaaacagagatttaccacagatttgtaaccggtgagaactaagaaaggggggattgcgatgagaaaagtattgttgatagcttccattgttgctcttattctcgcgctcttttcatgtgcaaatccgagttttgagccaaggagcaaagcaaaagatttagcatcgttaccggagataaaatctcagggttaccatatactcttcggtgaattgagggacggggaatataccgagggtaaaatcctcgttggttacaacgataggtcggaagtagataaaatagtcaaagcagttaacggtaaagtagtgctcgaattaccacagattaaagtggtctccataaaactcaatggaatgacggttaaacaagcatacgacaagataaaggcacttgcacttaaaggtatcaggtatgttgaaccaagttacaagagggagctcataaaaccaacagttgtgaagccaaatcctgatatgtacaaaatcagaaaacctgggttgaacagtactgcaagagattacggtgaagaactttccaacgaactctggggccttgaggcaattggtgtaacacaacagctttgggaagaagcatcgggaacaaatattatcgttgcggttgttgatactggtgtcgacggcacccatccagatttggaagggcaagttatcgcaggatacagaccggcatttgatgaagaactcccagcaggaacagattcatcctacggtggttcacatggaacacacgttgctggaacgattgcggcaaagaaagatggaaaaggtatcgttggtgttgcacctggtgcaaagataatgccgatagttatattcgatgacccagcacttgttggtggaaatggttacgttggcgacgattatgtcgcagcaggtataatttgggcaacagaccatggtgcaaaggtaatgaaccactcttggggtggctggggttacagctacacaatgaaagaagcatttgattatgcgatggagcatggagttgtcatggttgtctcagctggtaacaatacatcagattcacaccatcaatatccagcaggttatcctggtgttatccaagttgctgctcttgactactacggtggaacatttagagtggcaggtttttcaagcagaagcgatggagtctcagttggcgcacctggagttacgattctctcgacggttcctggcgaagatagtatcggatacgaagggcacaacgaaaacgttcctgcaacaaatggcggtacttatgattactatcaaggaacctcaatggctgcaccgcatgtaacaggtgttgttgctgtattgctacaaaaattcccgaacgcaaaaccatggcagataagaaaattactcgaaaacacagcattcgattttaacggaaatggttgggatcacgataccggttatggtctggtaaagctcgatgcagcattgcaaggtcctcttccgacacaaggtggagtcgaagagttccaagtagttgttacggatgctaaaggaaatttcggagtcccaacggtctttgtatcaatgatgagagacaatggttcatgctattatgcgaaaacaggtcctgatggtatagcaaggttcccacacatcgacagcggcacttacgacatatttgttggtggaccagaccactgggatagagctctggctccttacgatggagaaagtattcccggaggttatgccattgctttgagaatggctgaggaaaggcaagcttccttcgtcggctttggagtttctccagatgcaacacaactcaatgtcaattttaattcgacactgcaagttaaattcagcactaacctctcaacactgaaagacccacaatttgtggttgttgatccgttactaagaggagtttacggtcgtgtggcatacgcaagaaatcaaacatacgatttgtcgttactctcaggtcaaatttcatttggtatacaaacgctcttaccagcagcgacagatattacaatccaaggaacagtaacattgaacggtgaagacatccctgtttacggagttctaaaagctggaaccacatggactataattgatgactttggtggattgaatttgggcaccgactcgcagccaatctatgtctggtggacaatcttcggacagtgatagtttcattttaacgtcaaagcaaaccgatggggtgttcagaccccatcggttttttgttttgccttt

SEQ ID NO: 300 - protein, 381 aa, Geobacillus stearothermophilus
  Subtilisin J precursor  S08.035
MRSKKLWISLLFALTLIFTMAFSNMSVQAAGKSSTEKKYIVGFKQTMSAMSSAKKKDVISEKGGKVQKQFKYVNAAAATLDEKAVKELKKDPSVAYVEEDHIAHEYAQSVPYGISQIKAPALHSQGYTGSNVKVAVIDSGIDSSHPDLNVRGGASFVPSETNPYQDGSSHGTHVAGTIAALNNSIGVLGVSPSASLYAVKVLDSTGSGQYSWIINGIEWAISNNMDVINMSLGGPSGSTALKTVVDKAVSSGIVVAAAAGNEGSSGSSSTVGYPAKYPSTIAVGAVNSSNQRASFSSAGSELDVMAPGVSIQSTLPGGTYGAYNGTSMATPHVAGAAALILSKHPTWTNAQVRDRLESTATYLGNSFYYGKGLINVQAAAQ

SEQ ID NO: 301 - DNA, 2494 bp, Geobacillus stearothermophilus
  Subtilisin J precursor	 S08.035
gaattctccattttcttctgctatcaaaataacagactcgtgattttccaaacgagctttcaaaaaagcctctgccccttgcaaatcggatgcctgtctataaaattcccgatattggttaaacaacggcgcaatggcggccgcatctgatgtctttgcttggcgaatgttcatcttatttcttcctccctctcaataattttttcattctatcccttttctgtaaagtttatttttcagaatacttttatcatcatgctttgaaaaaatatcacgataatatccattgttctcacggaagcacacgcaggtcatttgaacgaattttttcgacagaaatttgccgggactcaggagcatttaacctaaaaaagcatgacatttcagcataatgaacatttactcatgtctattttcgttcttttctgtatgaaaatagttatttcgagtctctacggaaatagcgagagatgatatacctaaatagagataaaatcatctcaaaaaaatgggtctactaaaatattattccatctattacaataaattcacagaatagtcttttaagtaagtctactctgaatttttttaaaaggagagggtaaagagtgagaagcaaaaaattgtggatcagcttgttgtttgcgttaacgttaatctttacgatggcgttcagcaacatgtctgtgcaggctgccggaaaaagcagtacagaaaagaaatacattgtcggatttaaacagacaatgagtgccatgagttccgccaagaaaaaggatgttatttctgaaaaaggcggaaaggttcaaaagcaatttaagtatgttaacgcggccgcagcaacattggatgaaaaagctgtaaaagaattgaaaaaagatccgagcgttgcatatgtggaagaagatcatattgcacatgaatatgcgcaatctgttccttatggcatttctcaaattaaagcgccggctcttcactctcaaggctacacaggctctaacgtaaaagtagctgttatcgacagcggaattgactcttctcatcctgacttaaacgtcagaggcggagcaagcttcgtaccttctgaaacaaacccataccaggacggcagttctcacggtacgcatgtagccggtacgattgccgctcttaataactcaatcggtgttctgggcgtcagcccaagcgcatcattatatgcagtaaaagtgcttgattcaacaggaagcggccaatatagctggattattaacggcattgaatgggccatttccaacaatatggatgttattaacatgagccttggcggaccttctggttctacagcgctgaaaacagtcgttgataaagccgtttccagcggtatcgtcgttgctgccgctgccggaaacgaaggttcgtccggaagctcaagcacagtcggctaccctgcaaaatatccttctactattgcggtaggtgcggtaaacagcagcaaccaaagagcttcattctcaagcgcaggttctgagcttgatgtgatggctcctggcgtatccatccaaagcacacttcctggaggcacttacggtgcttacaacggcacgtccatggcgactcctcacgttgccggagcagcagcgctaattctttctaagcacccgacttggacaaacgcgcaagtccgtgatcgtttagaaagcactgcaacatatcttggaaactctttctactatggaaaagggttaatcaacgtacaagcagctgcacaataatagtaaaaagaagcaggttcctccatacctgcttctttttatttgtcagcatcctgatgttccggcgcattctcttctttctccgtatgttgaatccgttccatgatcgaaggatggctgcctctgaaaatcttcacaagcaccggaggatcaacctggctcagccccgtcacggccaaatcctgaaacgttttaacagcggcttctctgttctctgtcaactcgatcccatactggtcagccttattctcctgataacgcgagacagcattagaaaaaggcgtcaccgcaaagctcaaaacagaaaacaaaagcaataacagcggaagtgccgcaagatcatgccgcccttctaaatgaaacatgctgcgggttaggcgaaccgtccgcttgtaaagcttatcaatgacataaaatccggcgagcgacacgagcaaataaccagccagaccgatgtaaacgtgcttcatgacataatggcccatttcgtggcccataataaacaggatttctgaatcgtcaagtttgttcagcgtcgtatcccacaatacaatccgtttattggccccaattcctgtaacataggcattcagcgcatttgttttttctgacatgttcacttcatatacatggtcagccggaatattggcttcatctgccagctctaaaattttgctttcaagctctttgtttttcagcggataaaaatcattgtataaaggatcgactctagaggatcc

SEQ ID NO: 302 - protein, 381 aa, Bacillus subtilis
  Subtilisin E precursor  S08.036
MRSKKLWISLLFALTLIFTMAFSNMSVQAAGKSSTEKKYIVGFKQTMSAMSSAKKKDVISEKGGKVQKQFKYVNAAAATLDEKAVKELKKDPSVAYVEEDHIAHEYAQSVPYGISQIKAPALHSQGYTGSNVKVAVIDSGIDSSHPDLNVRGGASFVPSETNPYQDGSSHGTHVAGTIAALNNSIGVLGVSPSASLYAVKVLDSTGSGQYSWIINGIEWAISNNMDVINMSLGGPTGSTALKTVVDKAVSSGIVVAAAAGNEGSSGSTSTVGYPAKYPSTIAVGAVNSSNQRASFSSAGSELDVMAPGVSIQSTLPGGTYGAYNGTSMATPHVAGAAALILSKHPTWTNAQVRDRLESTATYLGNSFYYGKGLINVQAAAQ

SEQ ID NO: 303 - DNA, 1500 bp, Bacillus subtilis
  Subtilisin E precursor 	S08.036
gatatacctaaatagagataaaatcatctcaaaaaaatgggtctactaaaatattattccatctattacaataaattcacagaatagtcttttaagtaagtctactctgaatttttttaaaaggagagggtaaagagtgagaagcaaaaaattgtggatcagcttgttgtttgcgttaacgttaatctttacgatggcgttcagcaacatgtctgcgcaggctgccggaaaaagcagtacagaaaagaaatacattgtcggatttaaacagacaatgagtgccatgagttccgccaagaaaaaggatgttatttctgaaaaaggcggaaaggttcaaaagcaatttaagtatgttaacgcggccgcagcaacattggatgaaaaagctgtaaaagaattgaaaaaagatccgagcgttgcatatgtggaagaagatcatattgcacatgaatatgcgcaatctgttccttatggcatttctcaaattaaagcgccggctcttcactctcaaggctacacaggctctaacgtaaaagtagctgttatcgacagcggaattgactcttctcatcctgacttaaacgtcagaggcggagcaagcttcgtaccttctgaaacaaacccataccaggacggcagttctcacggtacgcatgtagccggtacgattgccgctcttaataactcaatcggtgttctgggcgttagcccaagcgcatcattatatgcagtaaaagtgcttgattcaacaggaagcggccaatatagctggattattaacggcattgagtgggccatttccaacaatatggatgttatcaacatgagccttggcggacctactggttctacagcgctgaaaacagtcgttgacaaagccgtttccagcggtatcgtcgttgctgccgcagccggaaacgaaggttcatccggaagcacaagcacagtcggctaccctgcaaaatatccttctactattgcagtaggtgcggtaaacagcagcaaccaaagagcttcattctccagcgcaggttctgagcttgatgtgatggctcctggcgtgtccatccaaagcacacttcctggaggcacttacggcgcttataacggaacgtccatggcgactcctcacgttgccggagcagcagcgttaattctttctaagcacccgacttggacaaacgcgcaagtccgtgatcgtttagaaagcactgcaacatatcttggaaactctttctactatggaaaagggttaatcaacgtacaagcagctgcacaataatagtaaaaagaagcaggttcctccatacctgcttctttttatttgtcagcatcctgatgttccggcgcattctcttctttctccgcatgttgaatccgttccatgatcgacggatggctgcctctgaaaatcttcacaagcaccggaggatcaacctgctcagccccgtcacggccaaatcctgaaacgttttaacactggcttctctgttctctgtc

SEQ ID NO: 304 - protein, 274 aa, Bacillus licheniformis
  Subtilisin DY  S08.037
AQTVPYGIPLIKADKVQAQGYKGANVKVGIIDTGIAASHTDLKVVGGASFVSGESYNTDGNGHGTHVAGTVAALDNTTGVLGVAPNVSLYAIKVLNSSGSGTYSAIVSGIEWATQNGLDVINMSLGGPSGSTALKQAVDKAYASGIVVVAAAGNSGSSGSQNTIGYPAKYDSVIAVGAVDSNKNRASFSSVGAELEVMAPGVSVYSTYPSNTYTSLNGTSMASPHVAGAAALILSKYPTLSASQVRNRLSSTATNLGDSFYYGKGLINVEAAAQ

SEQ ID NO: 305 - protein, 384 aa, Engyodontium album
  Proteinase K precursor  S08.054
MRLSVLLSLLPLALGAPAVEQRSEAAPLIEARGEMVANKYIVKFKEGSALSALDAAMEKISGKPDHVYKNVFSGFAATLDENMVRVLRAHPDVEYIEQDAVVTINAAQTNAPWGLARISSTSPGTSTYYYDESAGQGSCVYVIDTGIEASHPEFEGRAQMVKTYYYSSRDGNGHGTHCAGTVGSRTYGVAKKTQLFGVKVLDDNGSGQYSTIIAGMDFVASDKNNRNCPKGVVASLSLGGGYSSSVNSAAARLQSSGVMVAVAAGNNNADARNYSPASEPSVCTVGASDRYDRRSSFSNYGSVLDIFGPGTSILSTWIGGSTRSISGTSMATPHVAGLAAYLMTLGKTTAASACRYIADTANKGDLSNIPFGTVNLLAYNNYQA

SEQ ID NO: 306 - DNA, 2347 bp, Engyodontium album
  Proteinase K precursor	S08.054
cgaacagtataaagaaatagaggggacctaaactcatgttcaactctagggccccgttgaatcattcccccaaagtgggaacgccagtggcgacaaatctgtatactgtttcctgctttttctggtttgtcaaggttctcattaccctcttggctttctcctcttttcgcgacattgtgcttgtggtgtgcctatgtatgttgtagtcaatgctatatgtcaatggtttttgtcaaatgccatggcctagtggctctatgctggagctgctaattctgggcctttatcgactcctccgactagtcctgatgaagaagttgcaacactaccagcgtcacattcgccccattgatcacttcttgatccttcgcaataaccttcacggctgctcgaatgacttgacgtcacgatgggcctactatccaacttccagaacaggaaagtcgagatagttctacatagaccatggacgagttcatgagatgttggattcaaggataaatagctggccatgtcgccgcttcgatacagtttgtttcatctccatcatcagcatcaatcgcagcaatacaaagcatcctctcaaactcaacaaactttcttgattaagcaccgctttctcattcatcaacaacagccaaaatgcgtttgtctgttcttctgagtcttcttcccctcgctctcggcgctcctgccgttgagcagcgctccgaggctgctcctctgatcgaggcccgcggcgagatggttgccaacaagtacattgtcaagttcaaggagggtagcgctctttctgctctcgatgctgccatggagaagatttctggcaagcccgaccacgtctacaagaacgtcttcagtggtttcgctgcgacccttgacgagaacatggttcgggttctccgcgcccatcccgatgtaagttttcccatctataatctcttcccctaaaaagtctctcccttctaatatcgccgtcaggttgagtacattgagcaggatgctgttgtcaccatcaacgctgcgcagaccaacgctccctggggccttgctcgcatctccagcaccagccccggtacctctacttactactatgacgaatctgccggccaaggctcctgcgtctacgtgattgacaccggtatcgaggcatcgcaccccgagtttgagggtcgtgcccagatggtcaagacctactactactccagtcgcgacggtaacggtcacggcactcactgcgctggtaccgttggctcccgaacctacggtgtcgccaagaagacccagctctttggtgtcaaggtcctcgatgacaacggcagtggccagtactccaccatcatcgccggtatggactttgttgccagcgacaagaacaaccgcaactgccccaaaggtgtcgttgcctccttgtcccttggcggtggttactcctcctccgtgaacagcgccgctgccaggctccagagctctggtgtcatggtcgccgtcgctgccggtaacaacaacgctgacgcccgcaactactcccctgcttctgagccctcggtctgcactgtcggtgcttctgaccgctacgacagacgctccagcttctccaactacggcagcgttttggacatctttggccctggtaccagcattctctccacctggatcggcggcagcacccgctccatctctggaacttccatggctactccccacgttgccggtctcgctgcctacctcatgactcttggaaagactaccgccgccagcgcttgccgatacattgccgacaccgccaacaagggcgacttgagcaacattcccttcggcactgtcaacctgcttgcctacaacaactaccaggcttaagtccttcagtcaacgccaaaagctcaagatatgaaacaagttatgaatgcatctgtatatagacgagcatacttcatatcagtacataaccatccttagtatatttaaaaaggcaacgaatttgcagatttagctgtcagacagttagatttgcatgaatcagaagatatttgctttcataaattgcctcgtctcctttttgcgcttcacttattatctttcttgacaaattgaaacagtggcattaatttcctttctaaggaaatcgcatttaaatagtgaatgtaatcatatttgcacttactagaggtaggaccaaattatcgaggaacagttggtcatcgggcgggttcctcggcttctttctgttttagcaagtgtgtagtcctcgtgcatggccgatgatgattagtctgagagaacttgtgagctaacaacggcatctcgaggaaacgttcaactatgagccgaaagacaagtacttaat

SEQ ID NO: 307 - protein, 534 aa, Vibrio alginolyticus
  Alkaline serine exoprotease A precursor  S08.050
MLKKLLSCCITSALCFHSSLAFSQPNEIADSAELQQAPDTLPATLMLAPDDIAIADRYIVVFQQPQMMASSSPEFEQFTQQSVDRMSGLYSIQVESVFDHSISGFVANLSPEQLKDLRSDPRVDYIEQDRILSLDPIVSADANQTNAIWGLDRIDQRNLPLDNNYSANFDGTGVTAYVIDTGVNNAHVEFGGRSVSGYDFVDNDADASDCNGHGTHVAGTIGGSLYGVAKNVNLVGVRVLSCSGSGSTSGVIAGVDWVAANASGPSVANMSLGGGQSVALDSAVQSAVQSGVSFMLAAGNSNADACNYSPARVATGVTVGSTTSTDARSSFSNWGSCVDVFAPGSQIKSAWYDGGYKTISGTSMATPHVAGVAALYLQENSSVSPSQVEALIVSRASTGKVTDTRGSVNKLLYSLTDADCGQDCGGPDPTPDPEGKLTSGVPVSGLSGSSGQVAYYYVDVEAGQRLTVQMYGGSGDADLYLRFGAKPTLNAWDCRPFKYGNNETCTVSATQSGRYHVMIQGYSNYSGVSIQANY

SEQ ID NO: 308 - DNA, 1856 bp, Vibrio alginolyticus
  Alkaline serine exoprotease A precursor	S08.050
ctgcagcacgtattgagcataccacgctgattgtctgtgttttcgtgttgacagtttggtactaggtaaaatcaacaagactatgatttcaaggaacattttatgttaaagaaactactaagttgttgtatcacctccgcgctctgttttcattcttctctcgctttttcgcaacccaatgagattgcggacagtgcagagttacaacaagctcccgacacattgcctgccactttgatgcttgcaccggacgacatcgccattgcagatcgatatatagtggtatttcaacaaccgcaaatgatggcgagcagctcaccggaattcgagcaattcacgcaacagtctgtagaccgcatgtccggtttatattcgatacaagtggagtcggtttttgaccactcgatcagtggatttgtcgctaacttgagtcctgagcaactaaaagatctgcgttctgatcctcgtgtggactacattgagcaagacagaatcctatcgcttgacccaatagtctcggcagacgcaaatcaaaccaatgccatttggggactagatcgaatcgaccaacgtaacttgccactcgataacaactacagtgccaactttgatgggactggtgtaacggcttatgttatcgatactggtgtgaacaatgcacatgttgagtttggtgggcgctcggtttctgggtatgactttgtcgataatgatgcagatgcaagtgactgtaatggacacggcacacacgtggcgggcaccattggcggcagcttgtatggtgttgcgaaaaacgtcaaccttgtcggcgtgagagtattgagctgtagcggatcggggtctacgtctggtgttatcgccggtgtggattgggtggctgcgaacgcttccggaccttcagttgccaatatgagtttaggtggcggtcaatctgtcgctctcgatagtgcggtgcaaagtgcggttcaatcaggtgtcagctttatgcttgcagcaggtaactccaatgccgatgcgtgtaactactctccagcgcgcgttgctactggtgtaactgtcggctcgaccaccagcacggatgcacgttcgagtttttcaaactggggcagttgtgtggacgtgttcgcgccaggctcacaaatcaaatctgcgtggtatgacggtggttacaaaaccattagtggtacatcgatggcgacgccacatgtagcgggtgtagcagcactgtatcttcaagaaaacagttccgtgtcgccaagccaagtagaggccttgatcgtgagccgcgcaagtaccggaaaggtgacggacacaagaggcagcgtgaacaagctactttatagcttaacggatgcagattgtggccaagactgcggtggcccagatccaacaccggacccagaaggcaagttaacctcgggcgtgccagtgagcggtttaagtggctcaagcggtcaagtagcgtattactatgttgatgtagaagctgggcagcgcttaaccgtacaaatgtatggtggcagcggtgatgcggatttgtatctccgttttggtgcaaaaccgacactgaatgcatgggactgccgacctttcaaatacggtaacaatgaaacatgtacggtcagcgcgacacaaagtggacgctaccacgtcatgattcaaggttactcaaactatagcggtgtcagcattcaagctaactactagttgttattctcgttactaaaagagaacaaagcccgcttttcggtgggctttgctttcgggaatactaagtttaataggtggcgttcgatgctattcaaacgcaccggcctttttcttcaagaactcaactcgaagcggcatcgaagctt

SEQ ID NO: 309 - protein, 461 aa, Staphylococcus epidermidis
  Epidermin leader peptide-processing serine protease epiP precursor  S08.060
MNKFKFFIVFLILSLVFLQNEYAFGSSLNEELSYYSVEYDNAKTFKESIKQKNIELTYKIPELHTAQIKTSKSKLNSLIKSNKNVKFVNPTCSTCVVEKSVKTGKNLNNKKNGSHDLFDRQWDMRKITNEGKSYKLSPDRKKAKVALVDSGVNSSHTDLKSINKIVNEVPKNGFRGSENDESGNKNFEEDKLNHGTLVAGQIGANGNLKGVNPGVEMNVYRVFGSKKSEMLWVSKGIIDAANDDNDVINVSLGNYLIKDNQNKKKLRDDEKVDYDALQKAINYAQKKGSIVVAAVGNDGINVKKVKEINKKRNLNSKTSKKVYDSPANLNNVMTVGSIDDNDYISEFSNYGNNFIDLMTIGGSYKLLDKYGKDAWLEKGYMQKQSVLSTSSNGRYIYQSGTSLAAPKVSGALALEIDKYQLKDQPETAIELFKKKGIEKEKYMDKKHYGNGKLDVYKLLKE

SEQ ID NO: 310 - DNA, 8700 bp, Staphylococcus epidermidis
  Epidermin leader peptide-processing serine protease epiP precursor	S08.060
agatcttgtgttatataactaaacaaatttctccattcgtatttagaaaattgacttttatcaagtttatccaaatatatatttccagtatattctgtatttaacccagctaatatatttaataatgtactttttccacacccactttcacctataatattgtagatataacctttatgaagatccaaacttatagaatttattatttgtttattgtcttttgtgaagttcaaatcatttatttccattttttgaacaaagttattgtaagttgttttaatagttaatacctcttctggttctttatttatttttaaaattctatctgaagatccaattgctcgttgtacttccgtccaataagatgtaatagatactattggattaataatttgaaataaatataaaacataagcaaacatatctccgcttttcatcatattattttccattaagtaataacccaaaaataaaataccaaaaatgttaataaatagaattaagttcataattggttcgaaaaaagataatactttgatcttatgtaactctatatcgaatatattttttaatagggtatagttttttattttttcgatattatatgtacttaaagtttttattaattttattgtagataatctattactataataagaagataatttagcagtagcttcttgagatttacttgatactcttttcattatatttcctataggtagtattacaattatcaatataggtaatgtacacactaaatataatgtcaaggttttgttaattatatataaaaatattagtgatactataactgaaaataaattctacagaaaaaactctagttatgttcatagtatcgtttactaacctactagttaagttacttgctgagttttttaagtgaaaactataaggtaactttatcactttattccatgtaacacttctaatgttttgtattattttttgacctatatatccaagaatataagtagaaacaccagaaaatattaaagtcagaccaaaacatataataatgattacaattttatctgttgataagctagatttgtttaaggcatttctaattattaaaggaatgtataatgaaaaactagttccaatcaaactaaatattagtccaatacttaaaagtagagtgttaggtttggttattttccataaatcatatagacctttgataatatcatcaccttttaaactttatatcattaatataatgtttaggaaaagtagaagaaaattacacttttgtaattttctgaatatacatagtatttattttgggggagtactaaaataataattgaaaagggttttataatcctttttaataaatttttaggagtgtttaaaatggaagcagtaaaagaaaaaaatgatctttttaatcttgatgttaaagttaatgcaaaagaatctaacgattcaggagctgaaccaagaattgctagtaaatttatatgtactcctggatgtgcaaaaacaggtagttttaacagttattgttgttaattcagaagaattagattggcagggcttcaatagaggctctgtcttaattttgaggtgaaatagaattggataatatatttgttccatcgaatatatatatggtaagaactcctatattttcaattgaattatataatcaattcttaaaatctgacaatatagattatgacttaattttacaaaacgatatttttaaagaatctataatgacaacgacatataatctttatcaaagtattggcaaaatagactgggaaaaggataataaaaaaaccagaaatgtaaaagaaagtttattaaaatatctcataagaatgagtactagaagtacaccatatggaatgctaagcggtgtagctttaggggaatttagtgaaaataataatattaaaattaaggactcttcgtttcataaaaaagatgtaaaaatagatgggcaatggttatataaattagtccattatttagaaagcgattacacatattataaagacagttttgtcatatggaatcaacaaaattatatttataacaatcgtttatatttagataataattcatcaatcactgaaaataaaagaaatgatgtattatctgtcaaatacaattctatattagtgtttatacatgagaattctaaaaaaaatattacttatgaagaacttgtacaattgatatctagtaagtacagtatagaaaataaagaagaagtaaaagtatttgttcaagaactcataaataaagaaattatattttctgatttgagacctacattagagaataaaaatcctttagattacattattaatagtttaaatccaaaaaatagtttagttggaacacttattaatatttctaatgaaattacaaaatattctaaaatgcctttaggaaaaggagaatataaatatttagatattgttaatttaatgtcacaattatttgtttctaaaaactatttgcaaatagatacctatatagattattcaagaaatgaattaaaacaaagtttagctgataatattagtgaagcagcatatattctctggttattatctcctaatcattttggtacaaaaactattaggaattatcacgaattttttatggataaatatggatttgaacaactagtaaatttaaagcaattgctctcagatataaatggatttggctatcccaaaaaagacagttatagtttttctaataacattgcatttttaaaagaaaagtatttgcttgcaattcaaaataacagccatattgaaataacagaaaacgacgttaaaaatttagaaaagaataatacagtttctaaaatcaatgcgcctgtttcaactgaaatatatagtgagatatattttggaaattcaataaaaggttatgaggattttgccgtgataagtccaatattaggatcttttaatgccggtgcaacttttggaaggtttacgggaaatttcaatataaagaaaaaaaatcaattacaaaaagaaatagtgcatcattacaataattacatgaatgaaaatggtttagaaataagccaattaaatgaaggtcctcttaactcaagaaatgtaaatattttgaataataatagaatatataatacttgtttaaatttaaatttacctaaaagtgatatagatataaatgacatatttattggagctacatttaacaaactttatctatattctgaaaaacatgattcaagaattgtattcgtatctaattcaatgtttaattatgagtttggatctgaattatacaaatttttaagagaaatttcatttgaaaaaacaaaatttatacaacctataactgaagaaggcattgactcattacctttttgtccaagaattatttataaaaatattattttaaaaccagctacttggaaaataaattcagaaatgttttctgaaactgaaaattggttaaataggttcgcaactattagagaaaaatggcatattccaaaagatgtaattattgcttttggagataatcgattgctattaaatttattaaatgacaagcatctcattatactaaaaaaagaactaaaaaaacatggtaggattcgaatattagaaagctttatcaatgaatctaataatgagagaatgttagaaattgttacgccattatataaaaaaactagtttaaaagaacaatctttcattatacctaaaaatagaaataagcacttcaataatcttaaagattggttttcaattcatttaagtattcctaaaacataccaagataattttattcaagattatctattaccatttataacggaattaaaagttaataattttattaataaatttttttacataaaatttaaagaagatgaagattttataaaattaagattattaagagaagatgaagattattctcaaatttattctttcataaaaaattggaaagattattgcttattaaatagtgaattatatgactattctatagttgattatgttcctgaagtatatagatatggtggtccacacgtaattgaagatattgagaatttttttatgtatgatagtctattatcaataaatataatacaatcagagttcaaaattccaaaagaatttatcgttgctatatcaatagattttttattagattatttagaaattaataaaagtgagaaagaagaaattttaattaataatgcggaagatttatatcgtagtaatgacataagagaatataaaaatttattagctaaacttaccaatcctaaaaatgactatgaaattttaaaaaaagaatttccgaatcttcatgaatttctatttaataaaattagtattttagaaaatcttaaaaagacactacaaaaaagcttatatacttcacgttctaggataattggcagttttatacacatgcgttgtaatagaatattcggtattaatcctgaaaaagaaaaatttgttttatctatttttaatgaaattacaaaaactaaaaaatattgggatggttgtgattaatattaataacattaaaaaaattttagaaaataaaatcacctttttgtctgacattgaaaaagctacatatattatagaaaatcaaagtgagtattgggatccttatactctatctcatggttatccaggtataatactttttttaagcgcatcagaaaaagtatttcataaagatttagaaaaagtaatacatcaatatattagaaaactaggcccttatttagaaagtggtattgatggattttcactttttagtggtctttccggaattggatttgcgctagacattgcgtctgataaacagtactcttatcaaagtatcttagaacaaattgataatttacttgttcaatatgtttttgattttttaaataacgatgcattggaagtaacccctactaactatgatataatacaaggattttctggtataggaaggtacttgttaaatagaatatcgtataattataatgcaaaaaaagcattaaagcatatacttaattacttcaaaacaattcattactctaaagacaattggttagtttcaaatgaacatcaatttttagatatagataagcaaaattttccgtcaggaaatataaatttaggattagcgcatggtattttaggtcctctatcattaacagctttgagtaaaatgaatgggattgaaatcgaaggccatgaagagtttttacaagacttcacttcatttttgctcaaacctgaattcaaaaataataatgaatggttcgatcgctatgatatattagaaaattatatacctaattattccgtcagaaacggttggtgttacggtgatacagggattatgaatacattacttttgtctggtaaagccttaaataatgaaggcttaattaaaatgtctaaaaatattttaattaacataatagataagaataatgatgatttaatcagtccaaccttctgtcacggactagcatcgcacttaaccattattcatcaagcgaataaattctttaatctatctcaagtaagcacatatatcgataccattgtcagaaaaattattagtcattattctgaagaaagtagttttatgttccaagacatagagtactcatacggacaaaaaatttataaaaacaaagtgggaattctagagggtgaattaggtgttcttttagctttactagattatattgatacacaaaaccaatcaaggaaaaattggaaaaatatgtttttaataacataataggaggaataagatatgtatggaaaattattgatatgcgctacagcatcgataaatgtaattaatattaatcactacatagttgagttaaagcaacattttgatgaagttaatatattatttagtcctagtagtaaaaattttataaatactgatgttctcaagttattttgtgataacttgtacgatgaaattaaagatcctcttttaaatcatatcaatattgtagaaaatcatgaatatattttagtattacctgcatcagcaaatactattaataaaatagctaatggtatatgtgataatcttttaactactgtatgtttaaccggatatcaaaaattatttatatttccaaatatgaacataagaatgtggggaaatccatttttacaaaaaaatattgatttacttaaaaataatgatgtgaaagtgtattcccctgatatgaataaatcattcgaaatatctagtggccgttacaaaaacaatatcacaatgcctaatattgaaaatgtactaaattttgtattaaataacgaaaaaagacctttggattaacaaaggtcttttctaattaaaattttatatccgagtttacgttcattaataatttctatctctttacaattttttaaactatcccttaatcgatggatatatacatttattgtattagaatcaacaaagtcttctgtatcccacactcccttttttaattcctcttttgatacatatcttccaagattaatatataagcaccgtagaatttttaattctatattagaaagattaactaagtaattattaaacacaaattgatggttttcaaagtctataaaatcatcattaacatatttaatatacttttttatttcatttaaaattctacataatattaaacttttgctttcattattttttataatatataaatctatgcctaaactataaaaataacacttcctactatagctagtattacctgttattataactattggaatttttcctataaattcttttaaaaacgtataatactcatcaaacttttcatacacaattataaaatttgggtctatatttgaagaattaattgtaattcttctatctaattctaaaatactttcaataagaatagaatctacctcaccgacaatattaatagaaatcattttattcccttcattctttaagtaatttgtatacgtctagttttccattaccataatgttttttatccatatatttttctttttctatcccttttttcttaaataactctatagctgtttcgggttggtcttttaattgatacttatcaatttctagtgctaaagctccagaaaccttgggtgcagcaagtgatgtccctgattgatatatgtatcttccattagaagaagtacttaaaacactttgtttttgcatatatcctttttctaaccaagcatcttttccatacttatctaaaagtttataagaacctcctatcgtcattaaatctataaaattatttccataattagaaaactcagaaatataatcattatcatcgatggatcctacagtcataacattatttagatttgctgggctatcatataccttttttgatgttttagaatttagatttctttttttatttatttcttttactttttttacattgataccgtcattacccacagctgcaacaacaatactaccttttttttgagcatagtttatagctttctgtagtgcatcgtaatcaactttttcatcatctcttaatttttttttattttgattatctttaattaaataatttcctaaactaacgttgattacatcattgtcatcatttgctgcatcaataattcctttagatacccaaagcatttcacttttctttgagccaaatactcggtatacattcatctctactccagggtttacaccttttaaattaccgtttgctcctatttgtcctgctactaatgtaccatgattcaatttatcttcttcaaaatttttatttcctgattcatcgttttcgctacctctaaaaccatttttaggcacttcattaactatcttatttatactctttaaatctgtatgactactattcacaccagaatctactaaagcaacttttgctttttttctatctggacttagcttataacttttaccttcatttgttatttttcgcatatcccattgtctgtcaaataaatcatggctgccattttttttattatttaaattttttcctgtctttacagatttttcaactacacaagtggaacaggtaggatttacaaacttgacgtttttattactctttattagtgaatttaattttgatttgctagttttaatttgtgctgtatgtagttcaggaattttataagttaactcgatatttttttgtttaatggattctttaaaagtttttgcattatcatattcaacactataataacttaattcttcatttagtgaacttccaaaagcatactcattttgcaaaaaaactaatgacaatattaaaaaaacaatgaaaaatttaaatttgttcatatagcacctctaacatattatttatattaaacattaatttaacacttatgtttttacttttttatttatattatctttaataatgttctgttgcaagatgaaaaatacgaggtatcaaagtaccgatacagcgagtattacactcaattaattaaaaataaaatatgttgtgattaaaatttattttataaaagtatgggcaatttattattattcaagttaaaacaaagagtccgggacataaagtttcagcctcttcgtcctaattaccaaaaaacttactccaaaatccttttttagattggttttttctaatttttt

SEQ ID NO: 311 - protein, 1052 aa, Cricetulus griseus
  Site-1 protease (Subtilisin/kexin-isozyme 1) S08.063
MKLINIWLLLLVVLLCGKKHLGDRLGKKAFEKASCPSCSHLTLKVEFSSTVVEYEYIVAFNGYFTAKARNSFISSALKSSEVDNWRIIPRNNPSSDYPSDFEVIQIKEKQKAGLLTLEDHPNIKRVTPQRKVFRSLKFAESDPIVPCNETRWSQKWQSSRPLRRASLSLGSGFWHATGRHSSRRLLRAIPRQVAQTLQADVLWQMGYTGANVRVAVFDTGLSEKHPHFKNVKERTNWTNERTLDDGLGHGTFVAGVIASMRECQGFAPDAELHIFRVFTNNQVSYTSWFLDAFNYAILKKIDVLNLSIGGPDFMDHPFVDKVWELTANNVIMVSAIGNDGPLYGTLNNPADQMDVIGVGGIDFEDNIARFSSRGMTTWELPGGYGRVKPDIVTYGAGVRGSGVKGGCRALSGTSVASPVVAGAVTLLVSTVQKRELVNPASVKQALIASARRLPGVNMFEQGHGKLDLLRAYQILSSYKPQASLSPSYIDLTECPYMWPYCSQPIYYGGMPTIVNVTILNGMGVTGRIVDKPEWRPYLPQNGDNIEVAFSYSSVLWPWSGYLAISISVTKKAASWEGIAQGHIMITVASPAETEAKNGAEHTSTVKLPIKVKIIPTPPRSKRVLWDQYHNLRYPPGYFPRDNLRMKNDPLDWNGDHVHTNFRDMYQHLRSMGYFVEVLGAPFTCFDATQYGTLLMVDSEEEYFPEEIAKLRRDVDNGLSLVIFSDWYNTSVMRKVKFYDENTRQWWMPDTGGANIPALNELLSVWNMGFSDGLYEGEFALANHDMYYASGCSIAKFPEDGVVITQTFKDQGLEVLKQETAVVENVPILGLYQIPAEGGGRIVLYGDSNCLDDSHRQKDCFWLLDALLQYTSYGVNPPSLSHSGNRQRPPSGAGLAPPERMEGNHLHRYSKVLEAHLGDPKPRPLPACPHLSWAKPQPLNETAPSNLWKHQKLLSIDLDKVVLPNFRSNRPQVRPLSPGESGAWDIPGGIMPGRYNQEVGQTIPVFAFLGAMVALAFFVVQISKAKSRPKRRRPRAKRPQLTQQTHPPRTPSV

SEQ ID NO: 312 - DNA, 4198 bp, Cricetulus griseus
  Site-1 protease (Subtilisin/kexin-isozyme 1)	S08.063
tgttcgcggcagaggcgccgttcccccgggcccgccgacctcgagcctgaggcggacgcaggtcggccctcagagtggtttcttgggcatccccactagatttgggtctgtggtgcaaatggagtctaggactcagtcgactctgccctaatgagagaagcccctgtccaagatggagaagaagcggagaaagaaatgaaagcctctttttgggccaagctgtgggtgaccatgggactgaggttttctttacgttggacaagtctgtaggatggctgatcagtaaggttgcagcttttagccaaaacagaaattcacttctgatcaaggaagaacctagtgcgatttgaatttatgcaattttatgaccatattcacttaggaccatgaagctcatcaacatctggcttcttctgctggtggttttgctctgtggaaagaagcatctgggtgacaggctggggaagaaagcgtttgaaaaggcatcatgccctagctgttcccacctgactttgaaggtggaattctcctcaactgtggtggaatatgaatatattgtggctttcaacggatacttcacagccaaagctagaaactcatttatttcaagtgctctgaaaagcagtgaagtagacaactggagaattatacctcggaacaacccatccagtgactaccctagtgattttgaggtgattcagataaaagagaagcagaaggccgggctgctcacacttgaagatcatccaaacatcaagcgggtgacacctcaacgcaaagtctttcgttccttgaagtttgctgaatctgaccccattgtgccatgtaatgaaactcggtggagccagaagtggcagtcatcacgacccctgagaagagccagtctctccctgggctctggattctggcatgcaacaggaagacattcaagccggcgattgctgagagccattcctcgacaggttgcccagacattgcaggcagatgtgctgtggcagatgggatacacaggtgctaatgtcagggttgctgtttttgatactgggctcagtgagaagcatccacacttcaagaatgtgaaggagagaaccaactggaccaatgagcggaccctggatgatgggctgggccatggcacatttgtcgcaggtgtgattgccagcatgagggagtgccagggatttgccccagatgcagagctgcacatcttccgggtctttaccaacaatcaggtgtcttacacatcttggtttttggacgctttcaactatgccatcctaaagaagattgatgttctaaaccttagcatcggcgggcctgacttcatggatcatccctttgttgacaaggtgtgggaattaacagctaacaatgtaatcatggtttctgctatcggcaatgatggacctctttatggcactctgaataacccagctgatcagatggatgtgattggagtgggtggcattgactttgaagataacatcgcccgcttttcttccaggggaatgactacctgggaactaccaggaggctatggtcgcgtgaaacctgacattgtcacctatggtgccggagtgcggggttccggtgtgaaagggggctgccgggcactctcagggaccagtgtcgcttccccagtggttgctggggctgtcaccttgttagtaagcacagtgcagaagcgggagctagtgaatcctgccagtgtgaagcaagccctgattgcatcagcccggaggcttcctggtgttaacatgttcgagcaaggccatggcaagctggatctgctgcgagcctatcagatcctcagcagctacaaaccacaggcgagcttgagtcctagctacatcgacctgactgagtgtccctacatgtggccttactgttctcagcccatctactatggaggaatgccaacaattgttaatgtcaccatcctcaatggcatgggagtcacaggaagaattgtggataagcctgagtggcggccctatttaccacagaatggagacaacattgaagtggccttctcctactcctcagtgttatggccttggtcaggctacctggccatctccatttctgtgaccaagaaggcagcttcctgggaaggcattgcacagggtcacatcatgatcacggtggcttccccagcagagacggaagcaaaaaatggtgccgagcatacttccacagtgaagcttcccattaaggtgaagatcattcccacccctcctcggagcaagagagtcctctgggaccagtatcacaacctccgctaccccccaggctactttcccagggacaacttgcggatgaagaatgatcctttagactggaatggcgaccatgtccacaccaatttcagggacatgtaccagcacctgcgcagcatgggctacttcgtggaggtgctcggtgccccattcacgtgctttgatgctacacagtatggcactttgctcatggtggatagtgaagaagagtacttcccagaggagattgccaagctgaggagggacgtggacaatggcctttccctcgtcatcttcagtgactggtacaacacttctgttatgagaaaagtgaagttttacgatgaaaacacaaggcagtggtggatgccagatactggaggagccaacatcccagctctgaacgagctgctgtctgtgtggaacatggggttcagcgatggcctttatgaaggggagtttgccctggcgaatcatgacatgtattatgcatcgggatgcagcatcgccaagtttccagaagatggtgttgtgatcacacagactttcaaggaccaaggattggaggtcttaaaacaagagacagcagttgttgaaaatgttcccattttggggctttatcagattccagctgaaggtgggggccggatcgtgttgtatggagattccaattgcttggatgacagtcacagacagaaggattgcttttggcttctggatgcactccttcagtacacatcatatggcgtgaaccctcccagcctcagccattcagggaaccggcagcgcccacccagtggagctggcttggcccctcctgaaaggatggaaggaaaccaccttcatcgatactccaaggttcttgaggcccatctgggagacccaaaacctcggcctcttccagcctgtccacacttgtcatgggccaagccacagcctttgaatgagactgcgcccagtaatctttggaaacatcagaagctgctctccattgacctggacaaagtagtgttacccaactttcgatcgaatcgccctcaagtgagacctttgtcccctggagaaagtggtgcctgggacattcctggagggatcatgcctggccgctacaaccaagaggtgggccagaccatccctgtctttgccttcctcggagccatggtggccctggccttctttgtggtacagatcagcaaggccaaaagccggccgaagcggaggaggcccagggcaaagcgtccacagcttacacagcagacccacccaccaaggaccccgtcagtgtgatcatcacagtggccagccacagaagccaacaagccttggaccactctgatggccacacagggcatcagaagagcatcctgggaggtgcctatttccaagggaccccatctccagcttgtggctgggttagtgtgttctccccaggcatctctgagttacatcctgaagtacctcactgtgctgggctcttgacaggaggtgctcagtagctcagcctccagtggtgtcagcaggcccagtgacagtgcaccaaagacacagagcctggaagggctgtcgggacacactttctacataaagcttacaatcctgaccaagcgaagaaatgcttgttacaggctattttctatatttattgtggggagagtcactttaaagacttgtactgtttggaagcaaagctgttgtgtttgtcagttgagtgcagttttctgcagtgacatcataaggagtcagatcccatgacctttttgatgagaggacagactgaactgaagggcatgtgcacagatctgggaaatgcaagccttcgctttatttttataagtatcaactgccatcatgttttgtaatttggggtcttgatttcaccattgttggtgaaagaaattttcaataaatatgcataaccttaaaaaaaaaaaaaaaaaaaa

SEQ ID NO: 313 - protein, 409 aa, Hypocrea lixii
  Alkaline proteinase precursor (ALP)  S08.066
MTSIRRLALYLGALLPAVLAAPAALHKKPEAVPNKFIVTLKEGASIDTDSHLAWVTDIHTRSLTKRSTAGVEKTYNIHTWNAYAGEFDEETIEQIKSNPDVASVEPDYIMHLSDIVEDKRALTTQSGAPWGLGTVSHRTSGSTSYIYDSSAGAGTFAYVVDSGINTSHQQFGGRASLGYNAAGGQHVDTLGHGTHVSGTIGGSTYGVAKQASLISVKVFAGESASTSVILDGYNWAVNDIVSKSRASKSAINMSLGGPASSTWTTAINAAFNQGVLTIVAAGNGDSLGNPQPVSGTSPANVPNAITVAALDINWRTASFTNYGAGVDVFAPGVNILSSWIGSNTATNTISGTSMATPHVVGLALYLQSLEGLTSPTAVTNRIKALATSGRVTGSLNGSPNVIIFNGNSS

SEQ ID NO: 314 - DNA, 1458 bp, Hypocrea lixii
  Alkaline proteinase precursor (ALP)	S08.066
ctcctccactatacaaagcacatcacagccatgaccagcattcgtcgtctcgctctctatcttggagctttgctcccggctgtcctcgctgctcctgcagctcttcacaagaagcctgaagccgtacccaacaagttcatcgtcactcttaaagagggtgcttctattgataccgactctcatctcgcctgggtaacggacatccacacccgttcgttgaccaagcgtagcactgctggtgttgaaaagacttataacattcatacttggaatgcttatgcgggcgagtttgacgaggagacaattgagcagatcaagtccaaccccgatgttgcgtctgttgagccagactacatcatgcatctgtcggacattgttgaagacaagcgtgctctgaccacacaatctggtgctccttggggtctcggcactgtgtcccatcgcacatctggatccacaagctacatttatgatagctcagccggcgccggcacctttgcctatgtggttgactctggtatcaacacttctcatcagcaattcggcgggcgtgccagccttggctacaatgctgcaggaggacagcatgtcgatactcttggccatggtactcatgtttccggaacaattggtggatctacatacggtgttgctaagcaggcgagcctaatctctgtcaaggtctttgctggtgaaagtgcttccacctctgttatccttgacggctataactgggctgtaaacgacatcgtctcgaaaagccgtgctagcaagtctgctattaacatgtcgcttggaggacctgcctcatctacctggacgaccgccattaacgcagcctttaaccagggcgtgcttaccattgtcgccgctggtaatggcgactctctgggaaacccccagccagtctccggcacttctcctgctaacgttcctaacgccataaccgttgccgcattggacatcaactggcgcactgcttccttcaccaactatggtgctggcgttgatgtttttgcccctggcgtcaacattctgtcgtcatggattggatccaacactgctaccaacacaatcagcggtacttccatggctacacctcacgttgttggcctggccctctatcttcaatctctcgagggtctcacctctccgaccgctgtcactaaccgaattaaagctctggctacatctggtcgtgtaaccggaagcctcaacggcagccccaacgttatcatcttcaacggaaacagttcttaaatcgttgatggagcgaaggatgaagtgaaatgttcatggaagggcagcacagctgttgcttggcttgcttagctcatttaagaagctaatcaccatgatggagtgcgatgggtatataagcttctacagcgttttcaacttagctagatgaccctctatagatcgctaaaacaaaaagatatgacagatacctgtgct

SEQ ID NO: 315 - protein, 1045 aa, Serratia marcescens
  Extracellular serine protease precursor  S08.094
MILNKRLKLAYCVFLGCYGLSIHSSLAAYQDPGRLGAPDSWKTAEFNRQWGLEAISAEFAYARGYTGKGITIGVIDNAILSHSEFSGKLTRLDNGSYNFSYDKQDNMSFGDHGTHVAGIAAAKRDGAGMHGVAFDADIIGTKLNDYGNRNGREELIQSAARVINNSWGIAPDIRRDAKGDIIWLPNGRPDYVAFVKSEVIAEMMRSKSSVEWGSEQPVPTGGHSAMSTLLRAARHGKLIVFSAGNYNNYNIPEAQKSLPYAFPDVLNNYLIVTNLSDENQLSVSSTSCGQTASYCVSAPGSDIYSTVGRLESNTGGAVNREAYNKGELSLNPGYGNKSGTSMAAPHVTGVAAVLMQRFPYMSADQISAVIKTTATDLGVAGIDNLFGWGRVNLRDAINGPKMFITKEDIPQEYYVPGSYSEKQFVVNIPGLGNIVEPGTPVERRCTSSECSFDSWSNDISGHGGLTKTGAGTLALLGNNTYRGDTWVKQGVLAIDGSVASNVYIENSGTLSGEGTVGAFRAARSGSVAPGNGIGTLHVLHDAIFDRGSQYNVEVADNGRSDKIAARRAFLNGGSVNVSLERSQNLLSQNEAQSLLGNKYTILTTTDGVTGRFENANPSYPFVKVALDYRGNDVGLGITRTDASFDSLASTENEKAVARAVETLNATEPVTETAKRSVAIPAAEEANLLQSDGGEAQAVNEEASIVAGHPIYESFLGFTSARELQQATRQLSGQIHADMASAQINESRYLRDTATERLRQAEGRRTATDIKADDNGAWAKLLGSWGHASGNDNATGYQTSTYGVLLGLDSELFGDGRLGMMTGYTRTSLDGGYQSDAHSDNYHLGLYGDKRFGALALRAGGTYTWHRIDTSRSVNYGAQSDREKAKYNARTGQLFIESGYDWTSDAVNLEPFANLAYTHYRNEEINEQGGAAALRGDKQSQSATASTLGLRADTEWQTDSVAIALRGELGWQHQYGKLERKTQLMFKRTDAAFDVNSVPVSRDGAILKAGVDVSINKNAVLSLGYGGQLSSNHQDNSVNAGLTWRF

SEQ ID NO: 316 - DNA, 3675 bp, Serratia marcescens
  Extracellular serine protease precursor	S08.094
gatccttacgcccggtcccgatggtcggtcattccggcgcaacgggcgaaacgtacattcgcctcctctccagacgtcctgcgccatagccgcggcgcgatggcatccctttgtctgtccgcgcccatttgcatctctcagcatgtctgttcgtgcggcccgcgccgggtccgcatgtgttatccgtcgtttcacgatcataggaggtttcagcgcggttaaaacgtaagttttcttctgggtataaataaacatggagcgtaaaatgatacttaataaaagattgaagttagcgtattgcgtttttctgggttgttatggcttatccattcattcttctcttgccgcttatcaggatcccggtcgattgggcgcgcctgacagttggaaaaccgcggagtttaatcgccaatgggggcttgaagctatttccgccgaattcgcctatgccagaggctataccggaaaaggtataaccatcggcgttatcgataacgctattctttcccattctgaattctccggtaaactgacgcgcctggataacggcagttataatttctcgtatgataaacaagataatatgtctttcggcgatcacggcacgcacgtagccggtatcgctgcggctaaaagagatggcgcaggcatgcacggcgtcgctttcgacgcggatattatcggcaccaaattgaatgattacggtaatcgcaacggccgtgaagagctgattcagagcgcggctcgcgtcatcaataacagctgggggatcgcgccggatatccggcgagacgccaaaggcgatatcatctggttgccgaacggcaggccggactacgtggcattcgtaaaaagcgaagtgatcgccgagatgatgcgcagcaaatccagcgtggaatggggcagcgaacaaccggtgcccaccggcgggcacagcgccatgtcgacgctgctgcgggcggccaggcacggcaagctgatcgtcttctcggcgggcaattacaacaattacaatattccggaagcgcaaaagtcactgccttacgctttcccggacgtactgaataattacctgattgtgaccaacctgagtgacgaaaatcagttaagcgtttcctcgaccagctgcgggcaaacggccagctattgtgtttccgcgccgggttctgatatttacagcaccgtcggccggctggagtccaataccggcggcgccgtgaatcgcgaagcttataataagggcgagctgtcgcttaatcctggttacggcaacaaatccggcacctcaatggcggcgccgcatgtgaccggcgtcgccgccgtattgatgcagcgcttcccatatatgagcgccgatcaaatatctgcagtcattaaaaccaccgccaccgatttaggcgttgccggcattgataatttattcggctgggggcgcgtcaatttacgcgatgcgatcaacggcccgaaaatgtttattaccaaagaggatatcccgcaggaatattatgtgccgggttcctacagtgagaaacagtttgtggtgaatatccccggcctgggaaatatcgtcgaacccggcacgccggttgagcggcgctgcacgtcgagcgaatgcagtttcgattcgtggagtaacgacatcagcgggcacggcggcttgaccaaaacgggcgccggtacgctggcgctgttgggtaataacacctatcgcggtgatacctgggtgaaacagggcgtgttggcgatcgacggttcggtggcatccaacgtctatatcgaaaatagcggcacattgtccggcgagggcaccgtaggcgccttcagagcggctcggagcggcagcgtcgcgccgggcaacggcatcggcacgctgcatgtgttgcacgatgccatttttgatcgcggttcgcagtataacgtggaagtggcggacaatggccgcagcgataagatcgccgcgcggcgcgctttcctcaacggcggcagtgtgaatgtcagcctggaacgcagccaaaacctgctgtcgcagaatgaggcgcagagtctgctgggcaacaagtacaccatcctgaccacgacggacggcgttaccggtagattcgaaaacgccaacccatcgtatccgtttgttaaagtcgcgctggattatcggggcaatgacgtcggccttggcatcacgcgcaccgacgccagctttgacagcctggccagcactgagaacgagaaagcggtagctcgtgcggtggagacgctcaacgcgacggaaccggtcacggaaacggccaaacgcagcgtggcgatcccggcggccgaagaggccaacctgctgcaaagcgatgggggcgaggcgcaagccgtgaacgaagaggcgagcatcgtggcgggccatccgatctatgaaagcttcctcggcttcacctcggccagagaattgcaacaggcgacccgtcaactgtccggccagatccacgcggatatggcttccgcccagatcaacgaaagccgttacctgcgcgataccgccaccgagcgcttgcgccaggcggaaggccgccgcaccgctaccgacattaaagcggatgacaacggcgcctgggcgaaactgctgggtagctgggggcatgcttccggcaacgacaacgccaccggttaccagacctccacctatggcgtgctgttaggtctggacagcgaactgtttggcgacggccggcttggcatgatgaccgggtatacccgcacttcgctggatggaggttatcagtcagatgctcacagcgacaactaccatctggggctgtacggcgacaaacgcttcggcgcgttggcgctgcgagcgggcggcacctatacctggcatcgcatcgacacctcgcgttcggtgaactacggcgcgcagtcggatcgcgagaaggccaagtataacgcgcgcaccggtcagctgttcatcgaaagcggctacgattggacgagcgatgcggtcaaccttgagccgttcgccaacctggcgtatacccattaccgtaacgaggagatcaacgagcaaggcggggcagcggcgctgcgcggcgacaaacaaagtcagtccgccaccgcctcgacgttgggtctgcgcgccgacaccgagtggcaaaccgacagcgtggcgatcgcgctgcgcggcgagctgggttggcagcatcagtacggcaagctggagcgtaaaacgcagctgatgttcaaacgcactgatgcggcgttcgacgtgaacagcgtgcctgtttctcgcgatggcgcgattctgaaagcgggcgtcgatgtatcgattaacaaaaacgccgtcctgtcccttggctacggcgggcagctgtcgtccaaccaccaggacaacagcgtcaacgccggtctgacctggcgcttctgatcgcggttgcatgctttgctttattcagccctcatcgagacgatgggggcttttttttcgcggccagccggccttctgcggcatgagcgatactttctccgcgacctattcccccggccggtgttcgccgccgggttaatcaatcagaggaaaacaaacgctgctgccaatagcgcaattgcgtcagcgtgatcggcgcagcggcggcaatgaccgcgcgattttccaacgcaatctcccgcgcacgttgcaacggctcggcgctgaggcct

SEQ ID NO: 317 - protein, 1441 aa, Drosophila melanogaster
  Tripeptidyl-peptidase II (TPP-II) S08.090
MFNRFRLVHKQLRLYKNFGLLGQKASVGLTLPIISLSRPYMAYMGTERSVVMITAPATKEFAESSERSNSSKKTTNKEQSDKSAESRMATSGIVESFPTGALVPKAETGVLNFLQKYPEYDGRDVTIAIFDSGVDPRATGLETLCDGKTVKVIERYDCSGCGDVDMKKKVTPDENGNIKGLSGNSLKLSPELMALNTDPEKAVRVGLKSFSDLLPSKVRNNIVAQAKLKHWDKPHKTATANASRKIVEFESQNPGEASKLPWDKKILKENLDFELEMLNSYEKVYGDIKTSYDCILFPTADGWLTIVDTTEQGDLDQALRIGEYSRTHETRNVDDFLSISVNVHDEGNVLEVVGMSSPHGTHVSSIASGNHSSRDVDGVAPNAKIVSMTIGDGRLGSMETGTALVRAMTKVMELCRDGRRIDVINMSYGEHANWSNSGRIGELMNEVVNKYGVVWVASAGNHGPALCTVGTPPDISQPSLIGVGAYVSPQMMEAEYAMREKLPGNVYTWTSRDPCIDGGQGVTVCAPGGAIASVPQFTMSKSQLMNGTSMAAPHVAGAVALLISGLKQQNIEYSPYSIKRAISVTATKLGYVDPFAQGHGLLNVEKAFEHLTEHRQSKDNMLRFSVRVGNNADKGIHLRQGVQRNSIDYNVYIEPIFYNDKEADPKDKFNFNVRLNLIASQPWVQCGAFLDLSYGTRSIAVRVDPTGLQPGVHSAVIRAYDTDCVQKGSLFEIPVTVVQPHVLESDQNTPVFEPASSKGDNSVEFQPNTIQRDFILVPERATWAELRMRITDPNRGEDIGKFFVHTNQLLPKQSCRKLETMKIVSVGSENESIMAFKVKSGRILELCIAKYWSNYGQSHLKYSLRFRGVEAHNPNAYVMHAGRGIHKLEIEALVAEDVQPQLQLKNAEVVLKPTEAKISPLSATRDVIPDGRQVYQNLLAFNLNVAKAADVSIYAPIFNDLLYEAEFESQMWMLFDANKALVATGDAHSHTSFTKLDKGEYTIRLQVRHEKRDLLEKISEANLVASFKLTSPLTLDFYENYNQCIVGGRKYVSSPLRLSTRVLYIAPITQERLTKANLPAQCAWLSGNLVFPQDEVGRRVAQHPFTYILNPAEKKSHTNGSSNGSSAAGSTATAAAVTTANGAKPKAPATPQAATSVTNPAAGDGISVQNDPPVDSSGSPASPKKGKANADDYAESFRDFQCSQIVKCELEMAEKIYNDVVAAHPKHLQANLLLIQNIESNQLKSQLPLTFVNAQKTSPPEAGESADKQKEDQKKVRSALERIVKLADKVIQETDSEALLSYYGLKNDTRADAAKIKTNMDKQKNTLIEALSKKGIAVAKLAVLDDCIKDSLAEINELYTEIIKFVDANDSKAIQFALWHAYAHGHYGRMYKYVVKLIEEKRTRDHFVELAAINGALGHEHIRTVINRMMITAFPSSFRLF

SEQ ID NO: 318 - DNA, 4309 bp, Drosophila melanogaster
  Tripeptidyl-peptidase II (TPP-II)	 S08.090
ggcccgagtaccaatccgattcttcattgaacagctacgaaggaattcgcagagagttctgagcgcagcaatagcagcaagaagactaccaacaaagagcagagcgacaaatcagcggagagcaggatggccaccagcggtattgtcgagtcatttcccacgggcgcactggtgcccaaggcggagacgggagtcctgaactttctgcagaagtacccggagtacgatggacgcgacgtcaccatagccatcttcgattccggcgtcgatccccgggcaacgggactggagacgctgtgcgatggaaagaccgttaaagtaatagagcggtacgactgttccggatgcggcgacgtggacatgaagaagaaggtgacgccggacgagaacggcaacattaagggcctgtccggaaactcgctcaagctgagtccggagctgatggctctgaacacagatccggagaaggcggtgcgggtaggcctcaagagcttcagcgatttgttgccctccaaggtgcggaacaacattgtggcccaggccaagctgaagcactgggacaagccgcacaagacggccactgcaaacgccagtcgcaagattgttgaatttgagtcacaaaatccaggagaagcctcaaaactgccctgggacaagaagatattgaaagagaatctagactttgagctagagatgttgaatagctacgagaaggtgtacggcgacattaagacctcctacgattgcatcctttttcccacggccgacggatggctgacaatcgtcgacaccacggagcagggcgatctggatcaggctctgcgcattggcgagtattcccgcacgcacgagacccgcaatgtggacgactttctttccatatcggtaaacgtccacgacgagggcaacgtactggaggtggtcggcatgagctcaccccacggcacccacgtatcgtctattgccagcggcaaccatagctcccgggacgtggatggcgtggcgccgaatgctaagatcgtttctatgaccatcggtgatggtcgacttgggtctatggagaccggcacggcactagtgcgtgccatgactaaggtgatggaactatgtcgcgatggcagacgcatcgatgtgatcaacatgagctatggcgagcatgccaattggtcaaattccggccgcattggggagctcatgaacgaggttgtcaacaagtatggcgtggtgtgggtggcatcggccggcaaccatggtccggcactttgtactgtgggaactccgccggacatcagccagcccagtttgatcggcgtgggcgcgtacgtatcaccccaaatgatggaggccgagtatgcgatgcgagaaaagctgcccgggaacgtgtacacctggacatcgcgagatccctgcatcgacggaggtcaaggcgttaccgtatgcgctccgggcggagccattgcgtccgtgccacagtttactatgagcaagtcccagctgatgaacggtaccagcatggcggcacctcacgtcgccggcgcagtggcgctgctcatctccggtctgaagcaacagaacatcgagtattcgccgtacagtattaagcgagcgatcagcgtcactgccaccaaactgggctatgtagatccctttgctcagggccatggcttgctcaatgtcgagaaggcattcgagcatttgacggagcaccgccagtccaaggataatatgctcaggttctccgtgcgcgtgggcaacaacgcagacaagggcattcatttgcgtcagggcgtgcagcgtaactccatcgattacaacgtttatatagagcccatcttctacaatgacaaggaggcggatcccaaggacaagtttaacttcaatgtacggctaaatctgattgcctcgcagccgtgggtgcagtgtggagctttcttggatctcagctatggcacccgctccattgccgtgcgcgtcgatcccactggactccagccaggcgttcacagcgctgtgattcgggcttatgacactgactgcgtacagaagggttctctctttgagattcctgtcacggtggtgcagccccatgtgctggagtcggatcagaacacgcccgtcttcgaacccgcctcttccaagggagacaacagcgtggagtttcagccaaacaccattcaaagagacttcatcctggtgccagaacgtgctacttgggcggagttgcgtatgcgtataaccgatcccaatcgtggcgaggacattggaaagttctttgtacacacgaaccaacttcttcccaagcaatcctgtcgtaagcttgagaccatgaagatcgtatcggttggctcggaaaacgaatctataatggcttttaaagttaagtctggcaggattctggagctatgcattgccaagtactggtccaactacggccagagtcacctgaagtacagcttgcgtttccgtggcgtggaagcgcacaatcccaatgcctacgtcatgcatgcgggcaggggaattcataagctggagattgaggccctggttgccgaggatgtgcagccccagctacagctaaagaatgccgaagtggtgctaaaaccgaccgaggccaagatctcgccgctaagcgccacacgagacgtcatcccagatggacgtcaggtgtatcagaacctgctggcctttaacttgaacgtggccaaggccgcagatgtgtcgatatacgcaccgatctttaacgacttgttgtatgaagcggagtttgagtcacagatgtggatgctttttgatgcaaacaaggccctggtggccaccggcgatgctcactcccacacttccttcacaaagctcgataagggcgaatacacaatcagactgcaggtgcgtcacgagaagcgcgacctgctggagaagatctcggaggcaaatctggtggcctcattcaagctgactagccccctcacccttgatttctatgagaactacaatcagtgcatcgtgggaggtcgtaaatacgtctcgagtccgctaaggctgtccactcgggtgctttatatcgctcctattacccaagagcgacttaccaaggccaatctgcccgctcaatgcgcctggctgagcggcaatctggtattcccgcaagatgaggtcggacggcgagtggctcagcatccatttacttacatcctcaatcccgctgagaaaaagtcacacacgaatggctcgagcaacggttccagcgctgcaggatccacagctacggcagctgctgtcaccactgctaatggcgcaaaaccgaaagctccggcgactccacaagcggccacctcagtgaccaatcctgcggccggcgatggaatttctgttcagaacgacccgcctgtggacagcagtgggagtcccgcctcacccaaaaagggcaaggccaatgccgacgattatgccgaaagttttcgcgactttcaatgttcgcagattgtcaagtgtgaactggaaatggcagagaaaatctataatgatgtagtcgctgcccatcccaagcatttgcaggcaaacctgctacttatccagaacatcgagtccaatcagctgaagtcgcaactgccgctgactttcgtcaatgctcaaaagacatcgccaccagaggcaggcgagagcgccgacaagcaaaaggaggatcaaaagaaagtacgaagcgccctggagcgaattgttaagctggccgacaaggtgatccaggagaccgattccgaggcactgctctcctactacggtctgaagaacgacactcgtgccgatgcagccaagataaagaccaacatggacaaacagaaaaacactctcattgaggcgctaagcaagaagggcattgctgtggcaaagctggctgtattagacgactgtatcaaggatagcctggctgagatcaacgagctgtatacggagattatcaagttcgtggacgccaacgactccaaggccatccagttcggtctgtggcacgcctatgcccatggccactacggtcgcatgtacaagtatgtggttaagctaatcgaggagaagcgaacccgcgatcacttcgtggagctggccgccatcaacggcgccctgggtcacgagcacatccgtactgtcatcaaccgtatgatgatcactgcctttcccagcagcttccgtttgttctgagcactttccgacagaatacgcaacaaatattcacgcttcgaagcgatcattgttttgtataactaatgtaatccatatgtatatgaataaatgctattaactgaaaaaaaaaaaaaaa

SEQ ID NO: 319 - protein, 806 aa, Bacillus subtilis
  Minor extracellular protease vpr precursor S08.114
MKKGIIRFLLVSFVLFFALSTGITGVQAAPASSKTSADLEKAEVFGDIDMTTSKKTTVIVELKEKSLAEAKEAGESQSKSKLKTARTKAKNKAIKAVKNGKVNREYEQVFSGFSMKLPANEIPKLLAVKDVKAVYPNVTYKTDNMKDKDVTISEDAVSPQMDDSAPYIGANDAWDLGYTGKGIKVAIIDTGVEYNHPDLKKNFGQYKGYDFVDNDYDPKETPTGDPRGEATDHGTHVAGTVAANGTIKGVAPDATLLAYRVLGPGGSGTTENVIAGVERAVQDGADVMNLSLGNSLNNPDWATSTALDWAMSEGVVAVTSNGNSGPNGWTVGSPGTSREAISVGATQLPLNEYAVTFGSYSSAKVMGYNKEDDVKALNNKEVELVEAGIGEAKDFEGKDLTGKVAVVKRGSIAFVDKADNAKKAGAIGMVVYNNLSGEIEANVPGMSVPTIKLSLEDGEKLVSALKAGETKTTFKLTVSKALGEQVADFSSRGPVMDTWMIKPDISAPGVNIVSTIPTHDPDHPYGYGSKQGTSMASPHIAGAVAVIKQAKPKWSVEQIKAAIMNTAVTLKDSDGEVYPHNAQGAGSARIMNAIKADSLVSPGSYSYGTFLKENGNETKNETFTIENQSSIRKSYTLEYSFNGSGISTSGTSRVVIPAHQTGKATAKVKVNTKKTKAGTYEGTVIVREGGKTVAKVPTLLIVKEPDYPRVTSVSVSEGSVQGTYQIETYLPAGAEELAFLVYDSNLDFAGQAGIYKNQDKGYQYFDWDGTINGGTKLPAGEYYLLAYAANKGKSSQVLTEEPFTVE

SEQ ID NO: 320 - DNA, 2931 bp, Bacillus subtilis
  Minor extracellular protease vpr precursor	S08.114
gagatatccacatgtccacaaactctatctatattttgtatacgaagtatattcctaactatatatatacacaggtttattcacttatacacagggttctgtgtataactccttcgttatacacaaacaaaatccaataaatggtccaaatgacacaaggatttttttgaattttcaagaaatatatactagatctttcacattttttctaaatacaaagggggaaacacattgaaaaaggggatcattcgctttctgcttgtaagtttcgtcttattttttgcgttatccacaggcattacgggcgttcaggcagctccggcttcttcaaaaacgtcggctgatctggaaaaagccgaggtattcggtgatatcgatatgacgacaagcaaaaaaacaaccgttatagtggaattaaaagaaaaatccttggcagaagcgaaggaagcgggagaaagccaatcgaaaagcaagctgaaaaccgctcgcaccaaagcaaaaaacaaagcaatcaaagcagtgaaaaacggaaaagtaaaccgggaatatgagcaggtattctcaggcttctctatgaagcttccagctaatgagattccaaaacttctagcggtaaaagacgttaaggcagtgtacccgaacgtcacatataaaacagacaatatgaaggataaagacgtcacaatctccgaagacgccgtatctccgcaaatggatgacagtgcgccttatatcggagcaaacgatgcatgggatttaggctacacaggaaaaggcatcaaggtggcgattattgacactggggttgaatacaatcacccagatctgaagaaaaactttggacaatataaaggatacgattttgtggacaatgattacgatccaaaagaaacaccaaccggcgatccgaggggcgaggcaactgaccatggcacacacgtagccggaactgtggctgcaaacggaacgattaaaggcgtagcgcctgatgccacacttcttgcttatcgtgtgttagggcctggcggaagcggcacaacggaaaacgtcatcgcgggcgtggaacgtgcagtgcaggacggggcagatgtgatgaacctgtctctcggaaactctttaaacaacccggactgggcgacaagcacagcgcttgactgggccatgtcagaaggcgttgtcgctgttacctcaaacggcaacagcggaccgaacggctggacagtcggatcgccgggcacatcaagagaagcgatttctgtcggtgcgactcagctgccgctcaatgaatacgccgtcactttcggctcctactcttcagcaaaagtgatgggctacaacaaagaggacgacgtcaaagcgctcaataacaaagaagttgagcttgtcgaagcgggaatcggcgaagcaaaggattttgaagggaaagacctgacaggcaaagtcgccgttgtcaaacgaggcagcattgcatttgtggataaagcggataacgctaaaaaagccggtgcaatcggcatggttgtgtataacaacctctctggagaaattgaagccaatgtgccaggcatgtctgtcccaacgattaagctttcattagaagacggcgaaaaactcgtcagcgccctgaaagctggtgagacaaaaacaacattcaagttgacggtctcaaaagcgctcggtgaacaagtcgctgatttctcatcacgcggccctgttatggatacgtggatgattaagcctgatatttccgcgccaggggtcaatatcgtgagcacgatcccaacacacgatcctgaccatccatacggctacggatcaaaacaaggaacaagcatggcatcgcctcatattgccggagcggttgccgttattaaacaagccaaaccaaagtggagcgttgaacagattaaagccgccatcatgaataccgctgtcactttaaaggatagcgatggggaagtatatccgcataacgctcaaggcgcaggcagcgcaagaattatgaacgcaatcaaagccgattcgctcgtctcacctggaagctattcatacggcacgttcttgaaggaaaacggaaacgaaacaaaaaatgaaacgtttacgattgaaaatcaatcttccattagaaagtcatacacacttgaatactcatttaatggcagcggcatttccacatccggcacaagccgtgttgtgattccggcacatcaaaccgggaaagccactgcaaaagtaaaggtcaatacgaagaaaacaaaagctggcacctatgaaggaacggttatcgtcagagaaggcggaaaaacggtcgctaaggtacctacattgctgattgtgaaagagcccgattatccgagagtcacatctgtctctgtcagcgaagggtctgtacaaggtacctatcaaattgaaacctaccttcctgcgggagcggaagagctggcgttcctcgtctatgacagcaaccttgatttcgcaggccaagccggcatttataaaaaccaagataaaggttaccagtactttgactgggacggcacgattaatggcggaaccaaacttccggccggagagtattacttgctcgcatatgccgcgaacaaaggcaagtcaagccaggttttgaccgaagaacctttcactgttgaataagaaaaagccctgccgattcggcagggctttttaaagatcagtcagcaaacgcctcctgcaataagcgatacgatcggagcttatcttcaaaatgatgcgtgatggtcaccaccatgatttcctctgtttcatacgcgttactcaaagctaacagccgctccttaacctgttctttcgtaccaacaatcattcgatttcgattatcagcaattcgtctctgttcataaggagaatacgtattttccgaacagcttcatacgaggactcctctaaggatac

SEQ ID NO: 321 - protein, 1902 aa, Lactococcus lactis subsp. cremoris
  PIII-type proteinase precursor (Lactocepin) S08.116
MQRKKKGLSILLAGTVALGALAVLPVGEIQAKAAISQQTKGSSLANTVTAATAKQAATDTTAATTNQAIATQLAAKGIDYNKLNKVQQQDIYVDVIVQMSAAPASENGILRTDYSSTAEIQQETNKVIAAQASVKAAVEQVTQQTAGESYGYVVNGFSTKVRVVDIPKLKQIAGVKTVTLAKVYYPTDAKANSMANVQAVWSNYKYKGEGTVVSVIDSGIDPTHKDMRLSDDKDVKLTKSDVEKFTDTVKHGRYFNSKVPYGFNYADNNDTITDDKVDEQHGMHVAGIIGANGTGDDPAKSVVGVAPEAQLLAMKVFSNSDTSAKTGSATVVSAIEDSAKIGADVLNMSLGSNSGNQTLEDPELAAVQNANESGTAAVISAGNSGTSGSATEGVNKDYYGLQDNEMVGSPGTSRGATTVASAENTDVITQAVTITDGTGLQLGPETIQLSSHDFTGSFDQKKFYIVKDASGNLSKGALADYTADAKGKIAIVKRGEFSFDDKQKYAQAAGAAGLIIVNTDGTATPMTSIALTTTFPTFGLSSVTGQKLVDWVTAHPDDSLGVKITLAMLPNQKYTEDKMSDFTSYGPVSNLSFKPDITAPGGNIWSTQNNNGYTNMSGTSMASPFIAGSQALLKQALNNKNNPFYAYYKQLKGTALTDFLKTVEMNTAQPINDINYNNVIVSPRRQGAGLVDVKAAIDALEKNPSTVVAENGYPAVELKDFTSTDKTFKLTFTNRTTHELTYQMDSNTDTNAVYTSATDPNSGVLYDKKIDGAAIKAGSNITVPAGKTAQIEFTLSLPKSFDQQQFVEGFLNFKGSDGSRLNLPYMGFFGDWNDGKIVDSLNGITYSPAGGNFGTVPLLKNKNTGTQYYGGMVTDADGNKTVDDQAIAFSSDKNALYNDISMKYYLLRNISNVQVDILDGQGNKVTTLSSSTNRKKTYYNAHSQQYIYYNAPAWDGTYYDQRDGNIKTADDGSYTYRISGVPEGGDKRQVFDVPFKLDSKAPTVRHVALSAKTENGKTQYYLTAEAKDDLSGLDATKSVKTEINEVTNLDATFTDAGTTADGYTKIETPLSDEQAQALGNGDNSAELYLTDNASNATDQDASVQKPGSTSFDLIVNGGGIPDKISSTTTGYEANTQGGGTYTFSGTYPAAVDGTYTDAQGKKHDLNTTYDAATNSFTASMPVTNADYAAQVDLYADKAHTQLLKHFDTKVRLMAPTFTDLKFNNGSDQTSEATIKVTGTVSADTKTVNVGHTVAALDAQHHFSVDVPVNYGDNTIKVTATDKDGNTTTEQKTITSSYDPDMLKKSVTFDQGVKFGTNKFNATSAKFYDPKTGIATITGKVKHPTTTLQVDGKQIPIKDDLTFSFTLDLGTLGQKPFGVVVGDTTQNKTFQEALSFILDAVAPTLSLDSSTDAPVYTNDPNFQITGTATDNAQYLSLSINGSSVASQYEDININSGKPGHMAIDQPVKLLEGKNVLTVAVTDSEDNTTTKNITVYYEPKKTLAAPTVTPSTTEPAQTVTLTANAAATGETVQYSADGGKTYQDVPAAGVTITANGTFKFKSTDLYGNESPAVDYVVTNIKADDPAQLQAAKQELTNLIASAKTLSASGKYDDATTTALAAATQKAQTALDQTNASVDSLTGANRDLQTAINQLAAKLPADKKTSLLNQLQSVKDALGTDLGNQTDPSTGKTFTAALDDLVAQAQAGTQTDDQLQATLAKILDEVLAKLAEGIKAATPAEVGNAKDAATGKTWYADIADTLTSGQASADASDKLAHLQALQSLKTKVAAAVEAAKTVGKGDGTTGTSDKGGGQGTPAPAPGDTGKDKGDEGSQPSSGGNIPTKPATTTSTTTDDTTDRNGQLTSGKGALPKTGETTERPAFGFLGVIVVSLMGVLGLKRKQREE

SEQ ID NO: 322 - DNA, 8115 bp, Lactococcus lactis
  PIII-type proteinase precursor (Lactocepin)	S08.116
ttttgaattgtttgcctttaaaacgattcattactctgtcctctctgtcttttttctcaattttacactaaaatagattttttggaaaactttgcaacagaaccagatctatcaactctacttgacgaagagccaatttctaaaagaactggctgttatttcatcttactcggttaagccttaattcgttgtcgcaagcttcttataactatctagcgcatccgcaagatccttgtctttaatcgtcacatgctgattcttcaatacctgactgataacgcgttgcatgatgcttgaatcgcgagaccatttagcgtaaacgctggcagttagcgcctttttactgctagtaaaggtgcctttggcgggatggttaatcattttaataacttcatacccgtctgtcactttgactggggtctgcgtgtagtcaccattttttaatttgtaggcagcatccttaaatgtggcatcgagcgttttattgtttaattcaaaactaatcttcccgccgttatctttagtcgcagtatcaatggaatcagttttcgcaagcatggcaaaatccttgccagctgctaaatcactgataacttgcttagcagtgtcctcgtcgctagttagaatatgttggacagtcactttgggctgataggtcttccaagcggccttgagctggctttcagaaaccttttttaactttttcagtgcaacttcacttaaaaagttggttcgtaggctttccttgaagctactgcgactgaaaccgttttgacttaagaaagcatcgaaattttcgccgtattgttgtttgtagctatcataggcatcattaactgttttagtgctaaccgattttccataggcatgattcaatgcacgataaatgagcatgttagcaagcatggtctttgtcgttggtgactgtttgagttccttgtacaagctactttcagtcaccttgccacctgaataggtcgcaactgtttggtcggtctgatttgactgacaaccgcttagcagcagtaaagcagttgcggtacttgccaataatactttaaggcgcatttttttcttcatcgattcggtctcctctgaaatgcttacagtaaacgttgtgtatttattctagcgatggcaattgagaatttcaattcaaatactcattttctaataagtgctaaaaatttcaaaacatcttagtctgtaaacggctaaataataacgctaaaagttaatttacagataaaaaaattaataagaagattaaaattttcgttgaatttgttcttcaatagtatataatataatagtatataaattatattatataatataatcttaactacatcaagcgtaggctttgatttggttatgaaaacttttggaaagtggaggatattggatgcaaaggaaaaagaaagggctatcgatcttgttacagtaaacgttgtgtatttattctagcgatggcaattgagaatttcaattcaaatactcattttctaataaytgctaaaaatttcaaaacatctatagtctgtaaacggctaaataataacgctaaaagttaatttacagataaaaaaattaatagaagattaaaattttcgttgaatttgttcttcaatagtatataatataatagtatataatattatattatataatataatcttaactacatcaagcgtaggctttgatttggttatgaaacttttggaaagtggaggatattggatgcaaaggaaaaagaaagggctatcgatcttgttagccggtacagtcgctttaggggcgctggctgtcttgccagtcggcgaaatccaagcaaaggcggctatctcgcagcaaactaagggatcatcactcgcaaatacggtgacggctgcgactgctaagcaagcggccactgacacaactgcagcgacaacgaatcaagcgattgctacacagttggcggctaaaggtattgattacaataagctgaataaagttcagcagcaagatatttatgttgacgtcattgttcaaatgagcgcagcgcctgcctctgaaaacggcattttaagaactgattactccagcacggcggagattcagcaggagaccaataaagtgatcgcggctcaggcaagcgttaaagcagctgttgaacaagtcacccaacaaactgccggtgaaagttatggctatgtcgttaacggcttttcaactaaagttagggttgttgatatccctaaactgaaacaaattgccggagttaaaacagtcacattggcgaaagtttattatccgactgatgctaaggcaaactcgatggcgaatgtgcaagccgtatggtccaattacaaatataaaggtgaaggcacagttgtctcggttattgacagtggcattgatccaacacataaagacatgcggctaagcgatgataaagacgttaaactaaccaaatctgatgttgaaaaattcactgataccgttaagcatggccgctattttaattcaaaagtgccatatgggtttaattacgctgataataacgacaccattacagatgataaggttgacgaacaacacggcatgcatgttgctgggatcatcggtgctaacgggacaggtgacgatccagccaagtctgttgtcggagttgcaccagaagcacagctactggcaatgaaagttttcagcaactctgacacttctgcaaaaaccgggtcagctaccgtggtttctgccattgaagactcggcaaaaatcggtgccgatgtcctcaacatgtccttaggatctaattcaggcaaccaaaccttggaggatccagaacttgctgcggtgcaaaatgctaacgaatcaggaacagccgccgtcatttctgctgggaactcaggaacatccggttcagcaactgaaggcgtcaacaaagattattacggtttgcaagacaatgaaatggtgggatcgccagggacatcacgaggagcgaccacagttgcttccgctgaaaacacggatgtcatcactcaggcagtgaccattacagatggtacaggtttacagcttggaccggaaaccattcagctttcaagccacgatttcactggtagctttgaccaaaagaagttttatattgttaaagatgctagtggcaacctcagcaaaggggcattagccgactatactgctgacgctaaaggcaaaattgccatcgttaaacgtggcgaatttagctttgatgacaaacaaaaatacgcccaagccgctggtgctgctggcttgatcattgtcaacaccgatggcacagcaacaccgatgacttctattgcgttaaccaccaccttcccaacatttgggctctccagtgtaaccggtcaaaagctggttgactgggtcacagcacacccggatgatagtctcggtgtcaagattaccctggcgatgttaccaaatcagaaatatactgaagacaagatgtctgacttcacatcctatgggccagtttccaatctttccttcaaaccagatattaccgcaccaggcggcaacatctggtcaacgcaaaacaacaatggctacacaaatatgtctggtacgtcaatggcctcgccatttattgccggttcacaagcattgttgaaacaagcattgaataacaaaaacaacccattttatgcttactacaaacaacttaaagggacagcgctcaccgattttcttaagacagttgagatgaatactgcccagccaatcaacgatattaactacaataatgttatcgtatcgccgcggcggcaaggggccggtctggttgatgtgaaggcagccattgatgcattagaaaagaatccgtcaacggttgtcgccgaaaacggctacccggcagttgaattgaaagacttcacgagtacggacaagacctttaaactcaccttcacgaatcgcacgacccatgaactaacctatcaaatggacagtaatacggatactaatgccgtttatacatcagcgactgaccctaattctggggttttgtatgacaagaagattgatggagcagccattaaagctggcagtaacataactgtgcctgctgggaaaacggcgcagattgaattcacactatctttgccgaagtcttttgaccaacagcaatttgttgaaggttttctgaactttaagggtagcgatggatcgcgcttgaacttgccatacatgggcttttttggtgactggaatgacggtaagattgtcgatagtctcaatgggatcacttatagtcctgctggtggtaattttggcaccgtgccactattgaaaaacaaaaatacaggcactcaatattatggcggcatggtcacagacgctgatggcaacaagacagttgacgatcaggcgattgctttttcgagtgacaagaatgccttatataatgacatcagcatgaagtattatctattgcgcaatatcagcaacgtccaagttgatattcttgatggtcagggcaataaagttacgactctcagcagttccaccaatcggaagaagacctattataatgctcattcgcagcagtacatctactacaatgctccagcgtgggatggcacctattatgatcaacgtgatggcaacatcaagacggctgatgatggcagttatacttatcgtatttccggtgtaccggaaggcggcgacaaacgtcaagtgtttgatgtgcctttcaagctcgactctaaggcgccgacagttcgtcatgtcgctttgtcagccaaaacggaaaatgggaaaacccagtattatttgacagctgaagccaaggatgatttgagtggtcttgatgccaccaagagcgttaaaactgaaattaatgaagtgacgaatcttgatgctacctttaccgatgctgggacaacggctgatgggtacaccaaaattgaaacgccattatctgatgaacaggcccaagcacttggcaatggcgacaattcggctgagctgtacttgactgataatgcatccaatgccactgatcaagatgccagcgttcagaagccggggtctacatcgtttgatttaattgtgaacggcggcggtatcccagacaagatctcaagtaccacaaccggctacgaagccaatactcaaggtggcgggacgtatacgtttagtggaacgtatccagcagcggttgacggtacttacactgatgcacaaggaaagaaacatgatttgaacacaacctacgatgctgcgactaacagtttcactgcctcaatgccggtcacgaatgctgattacgccgcgcaagtggatctatatgccgataaggcgcatacccagttgcttaaacattttgacaccaaagttcggctgatggcgccaacctttactgatttgaaattcaacaatggctcggatcagacctctgaagcgaccatcaaggttacagggacggttagtgctgacaccaagacagttaatgttggccacaccgtagcagcacttgatgcacaacatcactttagtgttgatgtaccggttaattatggtgacaataccatcaaggtgaccgccaccgacaaagatggcaacaccacgacggagcaaaagacgattacctcgtcttatgatcctgatatgttgaagaagtctgtgacgttcgatcaaggtgtgaaatttggtaccaataaattcaatgccacctcggctaagttctatgaccctaagaccgggattgcgacgattactggtaaggtcaagcacccaacgacaacgttgcaggttgatggtaagcaaattccaatcaaggatgatctgactttcagtttcactttagatttaggtactcttggacaaaaaccgtttggggttgttgtgggtgacaccactcaaaacaaaaccttccaagaagcgttgtccttcattttggatgcagtggctccaacattgtcattggatagctcgacagatgcaccggtttataccaacgatccaaacttccagattaccggaacggccactgacaatgcgcaatatctgagtctgtcaattaacggcagttctgtcgccagccaatacgaagacatcaacatcaatagcggcaaaccaggtcatatggctattgatcagcccgttaaattgctcgaaggcaaaaacgtgctgactgttgctgttacagatagcgaagacaacaccacgaccaagaacatcacagtttactacgaaccaaagaaaacactggcagcaccaactgtgacgccaagtaccactgaaccagcccaaacggtgactctgacggcaaacgctgccgcaacgggcgaaacggttcagtatagtgctgatggtggcaagacatatcaggatgttccggcagccggtgtcacgatcacggcaaatggcaccttcaagtttaagtcgactgatttatacggtaatgaatcaccagccgtcgactatgttgtcaccaatatcaaggccgatgatcctgcacaattgcaggcagctaagcaggaactgactaatctgattgcttccgccaaaacgctaagtgccagcggtaagtatgatgatgccacaacgactgctttagcagcggcaacgcagaaggcacaaacggcgcttgatcagacgaacgcctcagttgattcacttactggtgccaatcgagacctgcaaactgcgatcaatcaattagctgccaagttacctgcagataagaagacttcgctgcttaaccagttgcaatctgtgaaggatgcgctgggaacggacttgggcaatcaaactgatccaagcactggcaaaacatttacggcagcgttagacgacctagtggcacaagctcaagcaggcacgcaaacggacgaccagcttcaagcaactcttgccaagatacttgatgaagtattagcaaaacttgcggagggtattaaagcggcaacaccggctgaggttggcaatgctaaagatgctgcaactggcaaaacttggtatgccgacattgctgacacattgacgtctggtcaagccagtgctgatgcgtctgacaagcttgcacatttacaagctttgcaaagtctgaaaacgaaggtggcagctgccgttgaagcggccaagacagttggtaaaggcgacggtacaaccggtactagcgacaaaggcggcggtcaaggtaccccggcgcccgctccaggcgacacaggtaaggacaaaggagatgagggcagccagcctagttctggcggtaatatcccaacaaagccagccacaacgacgtcaacgaccacggatgatacgactgatcgtaatggtcaacttacatccggtactagcgacaaaggcggcggtcaaggtaccccggcgcccgctccaggcgacataggtaaggacaaaggcgatgagggcagccagcctagttctggcggtaatatcccaacaaatccagccacaacgacgtcaacgaccacggatgatacgactgatcgtaatggtcaacttacatccggtaagggagcattacccaagacaggagagacaactgagcggccagcgtttggcttcttgggtgtcattgtggtcagtctgatgggggtattaggattgaaacggaaacaacgtgaagaatagcctgtccatgcgttgcgtttagggcagcagcgtatcgacaaaaagaaaagggcgctacgatatttggagttgaggttcaaagtcaaatggtactgatgaccggtaaaatttaatattttgaaccttgcttaggcagctgacttcacattgttgagatcagctgccttttgcttatagttcattgagtagaaacggttctgttgcgaagtttgaaaatcaaacgcgcccgctctgaactccaaatatcttaggctgttattcccattaataccttgatttcagtagacaccgaaaagccgaagagcgttccatttcttcggttatttttatatattcctcgaagggtctccatgcccttaatcgtggaagaggctgtacggagactttgataaaatttaatccgtcgtttaataggtcgatggtcttgttctattaaattgttaagatacttcacagttcggtgctctgtcttagtatataaaccca

SEQ ID NO: 323 - protein, 1101 aa, Drosophila melanogaster
  Furin-like protease 1, isoform 1-CRR precursor (Furin-1)  S08.048
MKNDVVRWSRQPTSNTTNSSSSSRSDSNSTHKHRSKSNKLNARQLGSNAARSCQQRSSVATTLEDEQQTIIECDIGNFNFDCNLFKTSFLTQHKQKRSGKSSSKSKSNRSRPLAKTKAVFLLALQFSAVVFLCNINVGFVAGSVATAASSAGGSSPAAPSSAPSSPPTVAVPPPPPPSSALKVDPNGQSPVLPPYVLDYETGGKAKLTPNNGKFGQSGSSGSNNNHIVGHYTHTWAVHIPNGDNGMADAVAKDHGFVNLGKIFDDHYHFAHHKVSKRSLSPATHHQTRLDDDDRVHWAKQQRAKSRSKRDFIRMRPSRTSSRAMSMVDAMSFNDSKWPQMWYLNRGGGLDMNVIPAWKMGITGKGVVVTILDDGLESDHPDIQDNYDPKASYDVNSHDDDPMPHYDMTDSNRHGTRCAGEVAATANNSFCAVGIAYGASVGGVRMLDGDVTDAVEARSLSLNPQHIDIYSASWGPDDDGKTVDGPGELASRAFIEGTTKGRGGKGSIFIWASGNGGREQDNCNCDGYTNSIWTLSISSATEEGHVPWYSEKCSSTLATTYSSGGQGEKQVVTTDLHHSCTVSHTGTSASAPLAAGIAALVLQSNQNLTWRDLQHIVVRTAKPANLKDPSWSRNGVGRRVSHSFGYGLMDAAEMVRVARNWKAVPEQQRCEINAPHVDKVIPPRTHITLQLTVNHCRSVNYLEHVQAKITLTSQRRGDIQLFLRSPANTSVTLLTPRIHDNSRSGFNQWPFMSVHTWGESPQGNWQLEIHNEGRYMAQITQWDMIFYGTETPAQPDDVANPSQSNQFNLYGNDMAHNDVEYDSTGQWRNMQQVGEVGMTRDHSNTAACLKWSDRKCLECNDSAYMFEDQCYDVCPVHTYPLDKFQAEEDEQDDEVTRGPVNPYSSSPMDHSLLMSNSLDDKQDPLQAEDRRRRSSLTQLVEVPSRVCAACDRSCLECYGALASQCSTCSPGSQLRKILNETFCYAYVVRSTGMASVVDISKMDDRDTQQYMTGTTVLLLVSVIFTLMGVAVAGGIVYHRRAMARSNELYSRVSLVPGDESDSDEDELFTAHFPARKSGVNIYRDEAPSEKIFEEDEISHLVP

SEQ ID NO: 324 - DNA, 3781 bp, Drosophila melanogaster
  Furin-like protease 1, isoform 1-CRR precursor (Furin-1)	S08.048
gacaacaacaaatttaaattgagattttccatattatcaaaagttacaggcgcctattttgcagttatcagtctgaagtcggtgtgaagtgctatcctggacttttcgttttagtcaccccttggcctcatctaacatccacttaattgaaatagaacatttgcatctcagcctcacaaccaatatcccgagcaacgtgcacaaaaactattggaaaaatcctaacccacaatgaaaaacgacgtcgtgcgatggagcaggcagccaactagcaacaccactaacagcagcagcagcagtagaagcgatagcaacagcactcataagcacagaagcaaaagcaacaaattaaatgctcgacaattagggtcaaatgctgccagaagttgtcagcaaagatcctctgtggcaacaacactagaagatgaacaacaaacaatcattgaatgtgatataggaaatttcaatttcgattgcaatttattcaaaactagttttttaacgcaacacaaacagaaacgtagtggcaagagcagcagcaaaagtaagagcaacagaagtagacccctagcgaaaacgaaagcggtgtttctattagctctgcaatttagtgccgtagtttttttatgtaatattaatgtcggtttcgtggccggaagtgtggcaactgcggcatcatcggcaggcggctcatcgccggcagctccatcatctgcgccctcatccccgcccacagttgctgtaccaccgccgccgccaccttcgtcggcactcaaagtggatccaaatggtcagtcaccagtgctgccgccctacgttctcgattatgagacggggggcaaggccaagctaacgccaaacaatggcaagttcggccaatcgggcagttccgggagcaataacaaccacatcgtcggacactatacccacacctgggcggtgcacataccaaacggcgataatggcatggccgatgcggttgccaaggatcacggattcgtcaatttgggcaagatcttcgatgatcactaccacttcgcacatcacaaggtctcgaagcggtcgctctcccccgccacgcatcaccaaactcgcctggatgacgacgatcgcgtccactgggcgaagcagcagcgggccaagtcgcgatccaaacgggactttatccgcatgcgaccctcacggacctcctcgcgagccatgtcgatggtggacgccatgtcctttaacgactccaagtggccgcagatgtggtatctgaatcgtggtggtggcctggacatgaatgtgatacccgcctggaagatgggcataaccggcaagggcgtggtggtgacaattctggatgatggcctggaatccgatcatccggacatacaggataactacgatcccaaagcctcgtacgatgtgaatagccacgacgacgatccgatgccgcattacgatatgacggactcgaaccgccatggaactcgctgtgccggcgaggtggcagccaccgccaacaattcgttctgcgcggtgggtattgcctacggcgccagtgtgggcggagtcaggatgctggacggagacgtcacggatgcggttgaggcacggtcgctgtcgctgaatccgcagcacattgacatatacagtgcctcctggggacccgatgacgatggcaagacggtggacggacccggcgaactggcatcgcgcgcctttatcgagggcacaactaagggacgcggcggcaagggcagcatcttcatatgggcatcgggcaatggtgggcgggagcaggataactgcaactgcgacggctacacgaactccatctggacgctgtccatctccagtgccacggaggagggccatgtgccctggtactcggagaagtgcagctccacgctggccaccacctacagcagcggcgggcagggcgagaagcaggtggtcaccacggacctgcaccactcgtgcactgtctcccacacgggcacctcggcgtcggccccgctcgccgctggcatagccgccctggtgctgcagtccaaccagaatctcacctggcgcgatctgcagcacattgttgtgcgcaccgccaagccggcgaaccttaaggaccccagctggtcacgcaatggggtggggcggcgggtgagccactcctttggctacggattgatggacgccgccgagatggtgcgcgtggcccgcaactggaaggcggtgccggagcagcagcggtgcgagattaacgctccccatgtcgacaaggtcattccacctcgtacccatatcaccctgcaactgacggttaatcactgtcgatcggtcaattacctggagcacgtccaggccaagattacgctaacgtcgcagagacgaggagacattcagctctttttgaggtctcccgcaaacaccagtgtcacgctcctaacgcctaggatacatgacaactctcgttccggattcaatcaatggcccttcatgtctgtgcacacctggggagagtcgccgcaaggaaactggcagctggagatccacaacgagggtcgctatatggcacaaatcacacaatgggatatgatattctacggcaccgaaacgcccgcccaacccgatgacgtggccaatcccagccagtcgaaccagttcaatctgtacggcaacgatatggcccacaatgacgtcgagtacgattccaccggccagtggaggaatatgcagcaggtgggcgaggtgggcatgacccgagatcacagcaacaccgccgcgtgccttaagtggagcgatcgcaagtgcttagagtgcaatgactccgcctatatgttcgaggaccagtgctacgatgtctgcccggtgcacacatatccattggacaagttccaagcagaggaggatgagcaggatgacgaggtgacaaggggtccggttaatccctacagcagctcccccatggatcattccctgttgatgtccaacagcttggatgacaagcaagatcctctgcaggcggaggatcgacgtcgtcgtagttcactcacccaactggtggaggtgccttctcgggtctgtgccgcctgcgatcggagctgcttggagtgctacggtgccctggcctcccagtgcagcacctgctccccgggcagccaactgcgtaagatcctgaacgagaccttctgctatgcctatgtggtgcgtagcacgggaatggccagtgtggtggacatttccaaaatggacgatagagatacccagcaatatatgactggcacaattgtgctccttttggtttcggtgattttcaccctgatgggcgtagcagtggccggtggcatcgtgtatcatcgaagggcaatggctcgatccaacgaactatactcccgagtttccctagtccccggtgacgaaagtgactctgacgaggatgaactgtttacggcccacttcccagcgagaaagagtggtgttaatatatatcgcgatgaagcgcccagcgaaaagatattcgaggaagatgagatcagccacttggtaccctaaataatcaaaacaagttattagttaggtcatgcatttagccatcctcataaccaccagaaatatatctatatgttaagcaaccgacaaacgcatttttggtctatattttgttacattcgacggcattacagctcctttatttcaagccaaaatagattaaagtattaaatgtaaaagaaaaaaaatcaaaactaattatttgtaatatttatgccttaataaaatgattttaactgaaaaaaaa

SEQ ID NO: 325 - protein, 814 aa, Saccharomyces cerevisiae
  Kexin precursor (KEX2 protease)   S08.048
MKVRKYITLCFWWAFSTSALVSSQQIPLKDHTSRQYFAVESNETLSRLEEMHPNWKYEHDVRGLPNHYVFSKELLKLGKRSSLEELQGDNNDHILSVHDLFPRNDLFKRLPVPAPPMDSSLLPVKEAEDKLSINDPLFERQWHLVNPSFPGSDINVLDLWYNNITGAGVVAAIVDDGLDYENEDLKDNFCAEGSWDFNDNTNLPKPRLSDDYHGTRCAGEIAAKKGNNFCGVGVGYNAKISGIRILSGDITTEDEAASLIYGLDVNDIYSCSWGPADDGRHLQGPSDLVKKALVKGVTEGRDSKGAIYVFASGNGGTRGDNCNYDGYTNSIYSITIGAIDHKDLHPPYSEGCSAVMAVTYSSGSGEYIHSSDINGRCSNSHGGTSAAAPLAAGVYTLLLEANPNLTWRDVQYLSILSAVGLEKNADGDWRDSAMGKKYSHRYGFGKIDAHKLIEMSKTWENVNAQTWFYLPTLYVSQSTNSTEETLESVITISEKSLQDANFKRIEHVTVTVDIDTEIRGTTTVDLISPAGIISNLGVVRPRDVSSEGFKDWTFMSVAHWGENGVGDWKIKVKTTENGHRIDFHSWRLKLFGESIDSSKTETFVFGNDKEEVEPAATESTVSQYSASSTSISISATSTSSISIGVETSAIPQTTTASTDPDSDPNTPKKLSSPRQAMHYFLTIFLIGATFLVLYFMFFMKSRRRIRRSRAETYEFDIIDTDSEYDSTLDNGTSGITEPEEVEDFDFDLSDEDHLASLSSSENGDAEHTIDSVLTNENPFSDPIKQKFPNDANAESASNKLQELQPDVPPSSGRS

SEQ ID NO: 326 - DNA, 2848 bp, Saccharomyces cerevisiae
  Kexin precursor (KEX2 protease)	 S08.048
tgcataattctgtcataagcctgttctttttcctggcttaaacatcccgttttgtaaaagagaaatctattccacatatttcattcattcggctaccatactaaggataaactaatcccgttgttttttggcctcgtcacataattataaactactaacccattatcagatgaaagtgaggaaatatattactttatgcttttggtgggccttttcaacatccgctcttgtatcatcacaacaaattccattgaaggaccatacgtcacgacagtattttgctgtagaaagcaatgaaacattatcccgcttggaggaaatgcatccaaattggaaatatgaacatgatgttcgagggctaccaaaccattatgttttttcaaaagagttgctaaaattgggcaaaagatcatcattagaagagttacagggggataacaacgaccacatattatctgtccatgatttattcccgcgtaacgacctatttaagagactaccggtgcctgctccaccaatggactcaagcttgttaccggtaaaagaagctgaggataaactcagcataaatgatccgctttttgagaggcagtggcacttggtcaatccaagttttcctggcagtgatataaatgttcttgatctgtggtacaataatattacaggcgcaggggtcgtggctgccattgttgatgatggccttgactacgaaaatgaagacttgaaggataatttttgcgctgaaggttcttgggatttcaacgacaataccaatttacctaaaccaagattatctgatgactaccatggtacgagatgtgcaggtgaaatagctgccaaaaaaggtaacaatttttgcggtgtcggggtaggttacaacgctaaaatctcaggcataagaatcttatccggtgatatcactacggaagatgaagctgcgtccttgatttatggtctagacgtaaacgatatatattcatgctcatggggtcccgctgatgacggaagacatttacaaggccctagtgacctggtgaaaaaggctttagtaaaaggtgttactgagggaagagattccaaaggagcgatttacgtttttgccagtggaaatggtggaactcgtggtgataattgcaattacgacggctatactaattccatatattctattactattggggctattgatcacaaagatctacatcctccttattccgaaggttgttccgccgtcatggcagtcacgtattcttcaggttcaggcgaatatattcattcgagtgatatcaacggcagatgcagtaatagccacggtggaacgtctgcggctgctccattagctgccggtgtttacactttgttactagaagccaacccaaacctaacttggagagacgtacagtatttatcaatcttgtctgcggtagggttagaaaagaacgctgacggagattggagagatagcgccatggggaagaaatactctcatcgctatggctttggtaaaatcgatgcccataagttaattgaaatgtccaagacctgggagaatgttaacgcacaaacctggttttacctgccaacattgtatgtttcccagtccacaaactccacggaagagacattagaatccgtcataaccatatcagaaaaaagtcttcaagatgctaacttcaagagaattgagcacgtcacggtaactgtagatattgatacagaaattaggggaactacgactgtcgatttaatatcaccagcggggataatttcaaaccttggcgttgtaagaccaagagatgtttcatcagagggattcaaagactggacattcatgtctgtagcacattggggtgagaacggcgtaggtgattggaaaatcaaggttaagacaacagaaaatggacacaggattgacttccacagttggaggctgaagctctttggggaatccattgattcatctaaaacagaaactttcgtctttggaaacgataaagaggaggttgaaccagctgctacagaaagtaccgtatcacaatattctgccagttcaacttctatttccatcagcgctacttctacatcttctatctcaattggtgtggaaacgtcggccattccccaaacgactactgcgagtaccgatcctgattctgatccaaacactcctaaaaaactttcctctcctaggcaagccatgcattattttttaacaatatttttgattggcgccacatttttggtgttatacttcatgttttttatgaaatcaaggagaaggatcagaaggtcaagagcggaaacgtatgaattcgatatcattgatacagactctgagtacgattctactttggacaatggaacttccggaattactgagcccgaagaggttgaggacttcgattttgatttgtccgatgaagaccatcttgcaagtttgtcttcatcagaaaacggtgatgctgaacatacaattgatagtgtactaacaaacgaaaatccatttagtgaccctataaagcaaaagttcccaaatgacgccaacgcagaatctgcttccaataaattacaagaattacagcctgatgttcctccatcttccggacgatcgtgattcgatatgtacagaaagcttcaaattacaaaatagcatttttttcttatagattataatactctctcatacgtatacgtatatgtgtatatgatatataaacaaacattaatatcctattccttccgtttgaaatccctatgatgtactttgcattgtttgcacccgcgaataaaatgaaaactccgaaccgatatatcaagcacataaaaggggagggtccaattaatgcat

SEQ ID NO: 327 - protein, 794 aa, Homo sapiens
  Furin precursor   S08.071
MELRPWLLWVVAATGTLVLLAADAQGQKVFTNTWAVRIPGGPAVANSVARKHGFLNLGQIFGDYYHFWHRGVTKRSLSPHRPRHSRLQREPQVQWLEQQVAKRRTKRDVYQEPTDPKFPQQWYLSGVTQRDLNVKAAWAQGYTGHGIVVSILDDGIEKNHPDLAGNYDPGASFDVNDQDPDPQPRYTQMNDNRHGTRCAGEVAAVANNGVCGVGVAYNARIGGVRMLDGEVTDAVEARSLGLNPNHIHIYSASWGPEDDGKTVDGPARLAEEAFFRGVSQGRGGLGSIFVWASGNGGREHDSCNCDGYTNSIYTLSISSATQFGNVPWYSEACSSTLATTYSSGNQNEKQIVTTDLRQKCTESHTGTSASAPLAAGIIALTLEANKNLTWRDMQHLVVQTSKPAHLNANDWATNGVGRKVSHSYGYGLLDAGAMVALAQNWTTVAPQRKCIIDILTEPKDIGKRLEVRKTVTACLGEPNHITRLEHAQARLTLSYNRRGDLAIHLVSPMGTRSTLLAARPHDYSADGFNDWAFMTTHSWDEDPSGEWVLEIENTSEANNYGTLTKFTLVLYGTAPEGLPVPPESSGCKTLTSSQACVVCEEGFSLHQKSCVQHCPPGFAPQVLDTHYSTENDVETIRASVCAPCHASCATCQGPALTDCLSCPSHASLDPVEQTCSRQSQSSRESPPQQQPPRLPPEVEAGQRLRAGLLPSHLPEVVAGLSCAFIVLVFVTVFLVLQLRSGFSFRGVKVYTMDRGLISYKGLPPEAWQEECPSDSEEDEGRGERTAFIKDQSAL

SEQ ID NO: 328 - DNA, 4180 bp, Homo sapiens
  Furin precursor 	S08.071
gcggggaagcagcagcggccaggatgaatcccaggtgctctggagctggatggtgaaggtcggcactcttcaccctcccgagccctgcccgtctcggccccatgcccccaccagtcagccccgggccacaggcagtgagcaggcacctgggagccgaggccctatgaccaggccaaggagacgggcgctccagggtcccagccacctgtcccccccatggagctgaggccctggttgctatgggtggtagcagcaacaggaaccttggtcctgctagcagctgatgctcagggccagaaggtcttcaccaacacgtgggctgtgcgcatccctggaggcccagcggtggccaacagtgtggcacggaagcatgggttcctcaacctgggccagatcttcggggactattaccacttctggcatcgaggagtgacgaagcggtccctgtcgcctcaccgcccgcggcacagccggctgcagagggagcctcaagtacagtggctggaacagcaggtggcaaagcgacggactaaacgggacgtgtaccaggagcccacagaccccaagtttcctcagcagtggtacctgtctggtgtcactcagcgggacctgaatgtgaaggcggcctgggcgcagggctacacagggcacggcattgtggtctccattctggacgatggcatcgagaagaaccacccggacttggcaggcaattatgatcctggggccagttttgatgtcaatgaccaggaccctgacccccagcctcggtacacacagatgaatgacaacaggcacggcacacggtgtgcgggggaagtggctgcggtggccaacaacggtgtctgtggtgtaggtgtggcctacaacgcccgcattggaggggtgcgcatgctggatggcgaggtgacagatgcagtggaggcacgctcgctgggcctgaaccccaaccacatccacatctacagtgccagctggggccccgaggatgacggcaagacagtggatgggccagcccgcctcgccgaggaggccttcttccgtggggttagccagggccgaggggggctgggctccatctttgtctgggcctcggggaacgggggccgggaacatgacagctgcaactgcgacggctacaccaacagtatctacacgctgtccatcagcagcgccacgcagtttggcaacgtgccgtggtacagcgaggcctgctcgtccacactggccacgacctacagcagtggcaaccagaatgagaagcagatcgtgacgactgacttgcggcagaagtgcacggagtctcacacgggcacctcagcctctgcccccttagcagccggcatcattgctctcaccctggaggccaataagaacctcacatggcgggacatgcaacacctggtggtacagacctcgaagccagcccacctcaatgccaacgactgggccaccaatggtgtgggccggaaagtgagccactcatatggctacgggcttttggacgcaggcgccatggtggccctggcccagaattggaccacagtggccccccagcggaagtgcatcatcgacatcctcaccgagcccaaagacatcgggaaacggctcgaggtgcggaagaccgtgaccgcgtgcctgggcgagcccaaccacatcactcggctggagcacgctcaggcgcggctcaccctgtcctataatcgccgtggcgacctggccatccacctggtcagccccatgggcacccgctccaccctgctggcagccaggccacatgactactccgcagatgggtttaatgactgggccttcatgacaactcattcctgggatgaggatccctctggcgagtgggtcctagagattgaaaacaccagcgaagccaacaactatgggacgctgaccaagttcaccctcgtactctatggcaccgcccctgaggggctgcccgtacctccagaaagcagtggctgcaagaccctcacgtccagtcaggcctgtgtggtgtgcgaggaaggcttctccctgcaccagaagagctgtgtccagcactgccctccaggcttcgccccccaagtcctcgatacgcactatagcaccgagaatgacgtggagaccatccgggccagcgtctgcgccccctgccacgcctcatgtgccacatgccaggggccggccctgacagactgcctcagctgccccagccacgcctccttggaccctgtggagcagacttgctcccggcaaagccagagcagccgagagtccccgccacagcagcagccacctcggctgcccccggaggtggaggcggggcaacggctgcgggcagggctgctgccctcacacctgcctgaggtggtggccggcctcagctgcgccttcatcgtgctggtcttcgtcactgtcttcctggtcctgcagctgcgctctggctttagttttcggggggtgaaggtgtacaccatggaccgtggcctcatctcctacaaggggctgccccctgaagcctggcaggaggagtgcccgtctgactcagaagaggacgagggccggggcgagaggaccgcctttatcaaagaccagagcgccctctgatgagcccactgcccaccccctcaagccaatcccctccttgggcactttttaattcaccaaagtatttttttatcttgggactgggtttggaccccagctgggaggcaagaggggtggagactgtttcccatcctaccctcgggcccacctggccacctgaggtgggcccaggaccagctggggcgtggggagggccgtaccccaccctcagcaccccttccatgtggagaaaggagtgaaacctttagggcagcttgccccggccccggccccagccagagttcctgcggagtgaagaggggcagcccttgcttgttgggattcctgacccaggccgcagctcttgcccttccctgtccctctaaagcaataatggtcccatccaggcagtcgggggctggcctaggagatatctgagggaggaggccacctctccaagggcttctgcaccctccaccctgtcccccagctctggtgagtcttggcggcagcagccatcataggaagggaccaaggcaaggcaggtgcctccaggtgtgcacgtggcatgtggcctgtggcctgtgtcccatgacccacccctgtgctccgtgcctccaccaccactggccaccaggctggcgcagccaaggccgaagctctggctgaaccctgtgctggtgtcctgaccaccctcccctctcttgcacccgcctctcccgtcagggcccaagtccctgttttctgagcccgggctgcctgggctgttggcactcacagacctggagcccctgggtgggtggtggggaggggcgctggcccagccggcctctctggcctcccacccgatgctgctttcccctgtggggatctcaggggctgtttgaggatatattttcactttgtgattatttcactttagatgctgatgatttgtttttgtatttttaatgggggtagcagctggactacccacgttctcacacccaccgtccgccctgctcctccctggctgccctggccctgaggtgtgggggctgcagcatgttgctgaggagtgaggaatagttgagccccaagtcctgaagaggcgggccagccaggcgggctcaaggaaagggggtcccagtgggaggggcaggctgacatctgtgtttcaagtggggctcgccatgccgggggttcataggtcactggctctccaagtgccagaggtgggcaggtggtggcactgagcccccccaacactgtgccctggtggagaaagcactgacctgtcatgcccccctcaaacctcctcttctgacgtgccttttgcacccctcccattaggacaatcagtcccctcccatctgggagtccccttttcttttctaccctagccattcctggtacccagccatctgcccaggggtgccccctcctctcccatccccctgccctcgtggccagcccggctggttttgtaagatactgggttggtgcacagtgatttttttcttgtaatttaaacaggcccagcattgctggttctatttaatggacatgagataatgttagaggttttaaagtgattaaacgtgcagactatgcaaaccag

SEQ ID NO: 329 - protein, 969 aa, Homo sapiens
  Subtilisin/kexin-like protease PACE4  S08.075
MPPRAPPAPGPRPPPRAAAATDTAAGAGGAGGAGGAGGPGFRPLAPRPWRWLLLLALPAACSAPPPRPVYTNHWAVQVLGGPAEADRVAAAHGYLNLGQIGNLEDYYHFYHSKTFKRSTLSSRGPHTFLRMDPQVKWLQQQEVKRRVKRQVRSDPQALYFNDPIWSNMWYLHCGDKNSRCRSEMNVQAAWKRGYTGKNVVVTILDDGIERNHPDLAPNYDSYASYDVNGNDYDPSPRYDASNENKHGTRCAGEVAASANNSYCIVGIAYNAKIGGIRMLDGDVTDVVEAKSLGIRPNYIDIYSASWGPDDDGKTVDGPGRLAKQAFEYGIKKGRQGLGSIFVWASGNGGREGDYCSCDGYTNSIYTISVSSATENGYKPWYLEECASTLATTYSSGAFYERKIVTTDLRQRCTDGHTGTSVSAPMVAGIIALALEANSQLTWRDVQHLLVKTSRPAHLKASDWKVNGAGHKVSHFYGFGLVDAEALVVEAKKWTAVPSQHMCVAASDKRPRSIPLVQVLRTTALTSACAEHSDQRVVYLEHVVVRTSISHPRRGDLQIYLVSPSGTKSQLLAKRLLDLSNEGFTNWEFMTVHCWGEKAEGQWTLEIQDLPSQVRNPEKQGKLKEWSLILYGTAEHPYHTFSAHQSRSRMLELSAPELEPPKAALSPSQVEVPEDEEDYTAQSTPGSANILQTSVCHPECGDKGCDGPNADQCLNCVHFSLGSVKTSRKCVSVCPLGYFGDTAARRCRRCHKGCETCSSRAATQCLSCRRGFYHHQEMNTCVTLCPAGFYADESQKNCLKCHPSCKKCVDEPEKCTVCKEGFSLARGSCIPDCEPGTYFDSELIRCGECHHTCGTCVGPGREECIHCAKNFHFHDWKCVPACGEGFYPEEMPGLPHKVCRRCDENCLSCAGSSRNCSRCKTGFTQLGTSCITNHTCSNADETFCEMVKSNRLCERKLFIQFCCRTCLLAG

SEQ ID NO: 330 - DNA, 4403 bp, Homo sapiens
  Subtilisin/kexin-like protease PACE4	S08.075
cgggaacgcgccgcggccgcctcctcctccccggctcccgcccgcggcggtgttggcggcggcggtggcggcggcggcggcgcttccccggcgcggagcggctttaaaaggcggcactccaccccccggcgcactcgcagctcgggcgccgcgcgagcctgtcgccgctatgcctccgcgcgcgccgcctgcgcccgggccccggccgccgccccgggccgccgccgccaccgacaccgccgcgggcgcggggggcgcggggggcgcggggggcgccggcgggcccgggttccggccgctcgcgccgcgtccctggcgctggctgctgctgctggcgctgcctgccgcctgctccgcgcccccgccgcgccccgtctacaccaaccactgggcggtgcaagtgctgggcggcccggccgaggcggaccgcgtggcggcggcgcacggctacctcaacttgggccagattggaaacctggaagattactaccatttttatcacagcaaaacctttaaaagatcaaccttgagtagcagaggccctcacaccttcctcagaatggacccccaggtgaaatggctccagcaacaggaagtgaaacgaagggtgaagagacaggtgcgaagtgacccgcaggccctttacttcaacgaccccatttggtccaacatgtggtacctgcattgtggcgacaagaacagtcgctgccggtcggaaatgaatgtccaggcagcgtggaagaggggctacacaggaaaaaacgtggtggtcaccatccttgatgatggcatagagagaaatcaccctgacctggccccaaattatgattcctacgccagctacgacgtgaacggcaatgattatgacccatctccacgatatgatgccagcaatgaaaataaacacggcactcgttgtgcgggagaagttgctgcttcagcaaacaattcctactgcatcgtgggcatagcgtacaatgccaaaataggaggcatccgcatgctggacggcgatgtcacagatgtggtcgaggcaaagtcgctgggcatcagacccaactacatcgacatttacagtgccagctgggggccggacgacgacggcaagacggtggacgggcccggccgactggctaagcaggctttcgagtatggcattaaaaagggccggcagggcctgggctccattttcgtctgggcatctgggaatggcgggagagagggggactactgctcgtgcgatggctacaccaacagcatctacaccatctccgtcagcagcgccaccgagaatggctacaagccctggtacctggaagagtgtgcctccaccctggccaccacctacagcagtggggccttttatgagcgaaaaatcgtcaccacggatctgcgtcagcgctgtaccgatggccacactgggacctcagtctctgcccccatggtggcgggcatcatcgccttggctctagaagcaaacagccagttaacctggagggacgtccagcacctgctagtgaagacatcccggccggcccacctgaaagcgagcgactggaaagtaaacggcgcgggtcataaagttagccatttctatggatttggtttggtggacgcagaagctctcgttgtggaggcaaagaagtggacagcagtgccatcgcagcacatgtgtgtggccgcctcggacaagagacccaggagcatccccttagtgcaggtgctgcggactacggccctgaccagcgcctgcgcggagcactcggaccagcgggtggtctacttggagcacgtggtggttcgcacctccatctcacacccacgccgaggagacctccagatctacctggtttctccctcgggaaccaagtctcaacttttggcaaagaggttgctggatctttccaatgaagggtttacaaactgggaattcatgactgtccactgctggggagaaaaggctgaagggcagtggaccttggaaatccaagatctgccatcccaggtccgcaacccggagaagcaagggaagttgaaagaatggagcctcatactgtatggcacagcagagcacccgtaccacaccttcagtgcccatcagtcccgctcgcggatgctggagctctcagccccagagctggagccacccaaggctgccctgtcaccctcccaggtggaagttcctgaagatgaggaagattacacagctcaatccaccccaggctctgctaatattttacagaccagtgtgtgccatccggagtgtggtgacaaaggctgtgatggccccaatgcagaccagtgcttgaactgcgtccacttcagcctggggagtgtcaagaccagcaggaagtgcgtgagtgtgtgccccttgggctactttggggacacagcagcaagacgctgtcgccggtgccacaaggggtgtgagacctgctccagcagagctgcgacgcagtgcctgtcttgccgccgcgggttctatcaccaccaggagatgaacacctgtgtgaccctctgtcctgcaggattttatgctgatgaaagtcagaaaaattgccttaaatgccacccaagctgtaaaaagtgcgtggatgaacctgagaaatgtactgtctgtaaagaaggattcagccttgcacggggcagctgcattcctgactgtgagccaggcacctactttgactcagagctgatcagatgtggggaatgccatcacacctgcggaacctgcgtggggccaggcagagaagagtgcattcactgtgcgaaaaacttccacttccacgactggaagtgtgtgccagcctgtggtgagggcttctacccagaagagatgccgggcttgccccacaaagtgtgtcgaaggtgtgacgagaactgcttgagctgtgcaggctccagcaggaactgtagcaggtgtaagacgggcttcacacagctggggacctcctgcatcaccaaccacacgtgcagcaacgctgacgagacattctgcgagatggtgaagtccaaccggctgtgcgaacggaagctcttcattcagttctgctgccgcacgtgcctcctggccgggtaagggtgcctagctgcccacagagggcaggcactcccatccatccatccgtccaccttcctccagactgtcggccagagtctgtttcaggagcggcgccctgcacctgacagctttatctccccaggagcagcatctctgagcacccaagccaggtgggtggtggctcttaaggaggtgttcctaaaatggtgatatcctctcaaatgctgcttgttggctccagtcttccgacaaactaacaggaacaaaatgaattctgggaatccacagctctggctttggagcagcttctgggaccataagtttactgaatcttcaagaccaaagcagaaaagaaaggcgcttggcatcacacatcactcttctccccgtgcttttctgcggctgtgtagtaaatctccccggcccagctggcgaaccctgggccatcctcacatgtgacaaagggccagcagtctacctgctcgttgcctgccactgagcagtctggggacggtttggtcagactataaataagataggtttgagggcataaaatgtatgaccactggggccggagtatctatttctacatagtcagctacttctgaaactgcagcagtggcttagaaagtccaattccaaagccagaccagaagattctatcccccgcagcgctctcctttgagcaagccgagctctccttgttaccgtgttctgtctgtgtcttcaggagtctcatggcctgaacgaccacctcgacctgatgcagagccttctgaggagaggcaacaggaggcattctgtggccagccaaaaggtaccccgatggccaagcaattcctctgaacaaaatgtaaagccagccatgcattgttaatcatccatcacttcccattttatggaattgcttttaaaatacatttggcctctgcccttcagaagactcgtttttaaggtggaaactcctgtgtctgtgtatattacaagcctacatgacacagttggatttattctgccaaacctgtgtaggcattttataagctacatgttctaatttttaccgatgttaattattttgacaaatatttcatatattttcattgaaatgcacagatctgcttgatcaattcccttgaatagggaagtaacatttgccttaaattttttcgacctcgtctttctccatattgtcctgctcccctgtttgacgacagtgcatttgccttgtcacctgtgagctggagagaacccagatgttgtttattgaatctacaactctgaaagagaaatcaatgaagcaagtacaatgttaaccctaaattaataaaagagttaacatccc

SEQ ID NO: 331 - protein, 662 aa, Anabaena variabilis
  Calcium-dependent protease precursor (Trypsin) S08.79
MVHVRYGGQNGEQYELAISENHIVVRTESRSSLISDRPFEAAPVSPQARNILNQFELSTRFSQAGVEVLHVKEPSHDGALRDTAREILNQEPEVQFAGRVLIDPVSQQPIVYTENLFVKFDHEEDVSFCQEILGRYGLTIKRQLEYARNAYFVSAPSNTGLAIFDISERLLNEESVELCHPELVREFRQRQAFPPQWHLKQTTIGGKTINAHANVEAAWKLSDGTGTIIAIIDDGVDIDHEEFRSSGKIVAPRDVTRKTNFPTPGNRDNHGTACAGVACGNGNFGASGVAPGAKLMPIRFVSALGSQDEADSFVWAAQNGADVISCSWGPPDGTWWDDKDPLHKQKVPLPDSTRLAMDYAINKGRNGKGCVILFAAGNGNESVDNDGYASYEKVIAVAACNDFGTRSAYSDFGTAVWCAFPSNNGNPSQTPGIWTADRTGVVGYNSGNTNLGDQAGNYTNSFGGTSSACPGAAGVAALILSRNPNLRWDEVRDIIKRSCDRIDPVGGNYNAEGRSPFYGYGRINALKAVELALPAQPEPVSIFTAVQDVPINDLQISQLSLAIANTNPIKSIKVTVDIEHTYIGDLVVSLNPPAESGVLPIILHDRKGGGADDIKQTYDEVSTPGLTALKGKIPQGTWTLEVADKAQADTGKIRSLTIELGF

SEQ ID NO: 332 - DNA, 2187 bp, Anabaena variabilis
  Calcium-dependent protease precursor (Trypsin)	S08.79
ggtaggctgttgattttgtgccttttcagggttgaaaaatttatgcactatcctgttctagctgagtaaaatttgcagtgggaaaagttcattacccattacccattacccatttctggaaagccagactgatagtttgtatccacaggaaattgttctaagctgcgtcttatgtgtgcgtcattttggaaacagcacacaaaatacagaggcttagtatcaacttaatagtaggagattaagtatggttcatgtccgctatggtggtcagaacggtgaacagtacgaattagcgattagtgagaatcatattgtagtacggactgaaagccgcagctcgctaattagcgatcgcccctttgaagccgcccctgtttcaccccaagcccgtaatatcctcaatcaattcgagttatcaactcgtttcagccaagcaggtgtagaagttctccatgtgaaggaaccaagccacgatggtgctttgcgcgacacagccagggaaattctcaatcaagaacctgaggtgcaatttgccggacgtgtgttaattgatccggtcagtcaacaacccatagtttacacagaaaacctcttcgtgaagtttgaccacgaagaagacgttagtttctgccaagaaattttgggacgctacggcttaacaattaaacgtcaactagaatacgcccgtaatgcctactttgtcagcgcaccctccaatactggtttagccatctttgatatttccgaaaggttgctcaacgaggaatcggtggaattgtgtcatcctgaattggtgcgggaatttagacaacgtcaggcatttcccccgcaatggcatctcaagcaaaccacgattgggggtaaaactatcaatgcccacgccaatgttgaggcggcatggaagttgagcgatggtacgggaacgattattgccattattgatgatggtgtggatatcgaccatgaagagttccgttcctctggtaagattgtcgcccctagagatgtcacacggaaaaccaactttcccacaccaggaaaccgagataatcacggtacggcttgtgcaggtgtagcttgtggtaatggcaactttggggcttctggggtagcgcctggggctaagttaatgcccattcgtttcgtttctgccctgggttcccaagatgaagccgactcttttgtctgggctgctcaaaatggtgcggatgtaatttcctgtagttgggggccaccagatggtacatggtgggatgataaagaccccctacacaagcagaaagtacctctacccgattccacaagactagcaatggactatgccatcaataaggggcgtaatggcaaaggatgtgtgattttattcgctgcgggtaatggtaacgaaagcgtagataatgacggctacgccagctatgaaaaggtcatagctgtcgcggcttgtaacgactttggtactaggagtgcttacagtgattttggtacagccgtctggtgtgcctttcctagcaacaacggtaacccttcccaaacccctggtatttggacagccgatcgcactggtgtagtcggttataattccggtaatactaatctcggtgaccaggcaggcaattatacaaatagtttcggtggcacctctagcgcctgtcctggtgcagctggtgtcgccgccttgattctctctcgcaatccaaatctgcgttgggatgaggtcagagatattattaaacgctcatgcgatcgcattgatccagttggtggtaactataacgctgaaggtcgtagcccattctacggttatggtcgtatcaatgccctcaaagcggtagaattggcactacccgcacaacctgagccagtcagcattttcacggctgtgcaggatgtccccatcaacgacttgcagatatctcaactcagtttagcgatcgctaacaccaaccccatcaaatctatcaaagttacggtagatatcgagcatacctacatcggtgacttagtagttagcctcaacccccctgctgaatccggtgtattaccaatcatcctccacgaccgcaaaggcgaggcgcagatgatatcaaacaaacttacgatgaggtgagtacaccaggactaactgctttgaagggtaaaattcctcaaggaacctggactttagaagtagcagataaagcacaggcg

SEQ ID NO: 333 - protein, 402 aa, Rattus norvegicus
  Caspase-1 precursor  C14.001
MADKVLRAKRKQFINSVSVGTINGLLDELLEKRVLNQEEMDTIKLANITVMEKARDLCDHVTKKGPRASQMFITYICNEDCYLAEILELQSGPSAETVFVTEDSKGGHPFSSETKEKLNKEGGAFPGPSGSLKFCPLEIAQKLWKENHSEIYPIMKTPTRTRLALIICNTDFQHLSRRVGADVDLREMKLLLQDLGYTVKVKENLTALEMTKELKEFAACPEHKTSDSTFLVFMSHGLQEGICGITYSNEVADILKVDTIFQMMNTLKCPSLKDKPKVIIIQACRGEKQGVVLLKDSVGNSEEGFLTDAIFEDDGIKKAHIEKDFIAFCSSTPDNVSWRHPVRGSLFIESLIKHMKEYAWSCDLEDIFRKVRFSFEQPDSRLQMPTTERVTLTKRFYLFPGH

SEQ ID NO: 334 - DNA, 1209 bp, Rattus norvegicus
  Caspase-1 precursor	C14.001
atggccgacaaggtcctgagggcaaagaggaagcaatttatcaactcagtgagtgtagggacaataaatggattgctggatgaacttttagagaagagagtcctgaaccaggaagagatggatacaatcaaacttgcaaatatcactgttatggaaaaggcacgagacctgtgcgatcatgtcactaaaaaaggaccccgggcaagccagatgtttatcacttacatttgtaatgaagactgctacctggcagaaattctggagcttcagtcaggtccatcagctgaaactgtttttgttacagaagattctaagggaggacatcctttctcctcagaaacaaaagaaaaactgaacaaagaaggtggcgcatttcctggaccgagtggttccctcaagttttgccctttagaaatagcccagaaattatggaaagaaaatcattcagagatttatccaataatgaaaacacccactcgtacacgtcttgccctcattatctgcaacacagactttcaacatctttctcggagagtcggagctgatgttgacctcagagaaatgaagttgctgctgcaggatctgggctatactgtgaaagtcaaagaaaatctcacagctctggagatgacaaaagaattgaaagaatttgctgcctgcccagagcacaagacttctgacagtaccttccttgtattcatgtctcatggtctccaggagggaatatgtgggatcacatactctaatgaagttgcagatattttaaaggttgacacaatctttcaaatgatgaacacattgaagtgcccaagcttgaaagacaagcccaaggttatcattattcaggcatgccgtggagagaaacaaggagtggtgttgttaaaagattcagtaggaaactccgaagagggattcttaacagatgcaatttttgaagatgatggcattaagaaggcccatatagagaaagattttattgctttctgctcttcaacaccagataatgtgtcctggagacatcctgtccggggatccctcttcattgagtcactcatcaaacacatgaaagaatatgcctggtcttgtgacttggaggacattttcagaaaggttcgattttctttcgaacaaccagactctagactacagatgccaaccactgaaagggtgaccctgacaaaacgtttctacctcttcccaggacattag

SEQ ID NO: 335 - protein, 503 aa, Caenorhabditis elegans
  Cell death protein 3 precursor   C14.002
MMRQDRRSLLERNIMMFSSHLKVDEILEVLIAKQVLNSDNGDMINSCGTVREKRREIVKAVQRRGDVAFDAFYDALRSTGHEGLAEVLEPLARSVDSNAVEFECPMSPASHRRSRALSPAGYTSPTRVHRDSVSSVSSFTSYQDIYSRARSRSRSRALHSSDRHNYSSPPVNAFPSQPSSANSSFTGCSSLGYSSSRNRSFSKASGPTQYIFHEEDMNFVDAPTISRVFDEKTMYRNFSSPRGMCLIINNEHFEQMPTRNGTKADKDNLTNLFRCMGYTVICKDNLTGRGMLLTIRDFAKHESHGDSAILVILSHGEENVIIGVDDIPISTHEIYDLLNAANAPRLANKPKIVFVQACRGERRDNGFPVLDSVDGVPAFLRRGWDNRDGPLFNFLGCVRPQVQQVWRKKPSQADILIAYATTAQYVSWRNSARGSWFIQAVCEVFSTHAKDMDVVELLTEVNKKVACGFQTSQGSNILKQMPEMTSRLLKKFYFWPEARNSAV

SEQ ID NO: 336 - DNA, 7653 bp, Caenorhabditis elegans
  Cell death protein 3 precursor	C14.002
agatctgaaataaggtgataaattaataaattaagtgtatttctgaggaaatttgactgttttagcacaattaatcttgtttcagaaaaaaagtccagttttctagatttttccgtcttattgtcgaattaatatccctattatcactttttcatgctcatcctcgagcggcacgtcctcaaagaattgtgagagcaaacgcgctcccattgacctccacactcagccgccaaaacaaacgttcgaacattcgtgtgttgtgctccttttccgttatcttgcagtcatcttttgtcgtttttttctttgttctttttgttgaacgtgttgctaagcaattattacatcaattgaagaaaaggctcgccgatttattgttgccagaaagattctgagattctcgaagtcgattttataatatttaaccttggtttttgcattgtttcgtttaaaaaaaccactgtttatgtgaaaaacgattagtttactaataaaactacttttaaacctttacctttacctcaccgctccgtgttcatggctcatagattttcgatactcaaatccaaaaataaatttacgagggcaattaatgtgaaacaaaaacaatcctaagatttccacatgtttgacctctccggcaccttcttccttagccccaccactccatcacctctttggcggtgttcttcgaaacccacttaggaaagcagtgtgtatctcatttggtatgctcttttcgattttatagctctttgtcgcaatttcaatgctttaaacaatccaaatcgcattatatttgtgcatggaggcaaatgacggggttggaatcttagatgagatcaggagctttcagggtaaacgcccggttcattttgtaccacatttcatcattttcctgtcgtccttggtatcctcaacttgtcccggttttgttttcggtacactcttccgtgatgccacctgtctccgtctcaattatcgtttagaaatgtgaactgtccagatgggtgactcatattgctgctgctacaatccactttcttttctcatcggcagtcttacgagcccatcataaacttttttttccgcgaaatttgcaataaaccggccaaaaactttctccaaattgttacgcaatatatacaatccataagaatatcttctcaatgtttatgatttcttcgcagcactttctcttcgtgtgctaacatcttatttttataatatttccgctaaaattccgatttttgagtattaatttatcgtaaaattatcataatagcaccgaaaactactaaaaatggtaaaagctccttttaaatcggctcgacattatcgtattaaggaatcacaaaattctgagaatgcgtactgcgcaacatatttgacggcaaaatatctcgtagcgaaaactacagtaattctttaaatgactactgtagcgcttgtgtcgatttacgggctcaatttttgaaaataattttttttttcgaattttgataacccgtaaatcgtcacaacgctacagtagtcatttaaaggattactgtagttctagctacgagatattttgcgcgccaaatatgactgtaatacgcattctctgaattttgtgtttccgtaataatttcacaagattttggcattccactttaaaggcgcacaggatttattccaatgggtctcggcacgcaaaaagtttgatagacttttaaattctccttgcatttttaattcaattactaaaattttcgtgaatttttctgttaaaatttttaaaatcagttttctaatattttccaggctgacaaacagaaacaaaaacacaacaaacattttaaaaatcagttttcaaattaaaaataacgatttctcattgaaaattgtgttttatgtttgcgaaaataaaagagaactgattcaaaacaattttaacaaaaaaaaaccccaaaattcgccagaaatcaagataaaaaattcaagagggtcaaaattttccgattttactgactttcaccttttttttcgtagttcagtgcagttgttggagtttttgacgaaaactaggaaaaaaatcgataaaaattactcaaatcgagctgaattttgaggacaatgtttaaaaaaaaacactatttttccaataatttcactcattttcagactaaatcgaaaatcaaatcgtactctgactacgggtcagtagagaggtcaaccatcagccgaagatgatgcgtcaagatagaaggagcttgctagagaggaacattatgatgttctctagtcatctaaaagtcgatgaaattctcgaagttctcatcgcaaaacaagtgttgaatagtgataatggagatatgattaatgtgagtttttaatcgaataataattttaaaaaaaaattgataatataaagaatatttttgcagtcatgtggaacggttcgcgagaagagacgggagatcgtgaaagcagtgcaacgacggggagatgtggcgttcgacgcgttttatgatgctcttcgctctacgggacacgaaggacttgctgaagttcttgaacctctcgccagatcgtaggtttttaaagttcggcgcaaaagcaagggtctcacggaaaaaagaggcggatcgtaattttgcaacccaccggcacggttttttcctccgaaaatcggaaattatgcactttcccaaatatttgaagtgaaatatattttatttactgaaagctcgagtgattatttattttttaacactaattttcgtggcgcaaaaggccattttgtagatttgccgaaaatacttgtcacacacacacacacacatctccttcaaatatccctttttccagtgttgactcgaatgctgtcgaattcgagtgtccaatgtcaccggcaagccatcgtcggagccgcgcattgagccccgccggctacacttcaccgacccgagttcaccgtgacagcgtctcttcagtgtcatcattcacttcttatcaggatatctactcaagagcaagatctcgttctcgatcgcgtgcacttcattcatcggatcgacacaattattcatctcctccagtcaacgcatttcccagccaaccttgtatgttgatgcgaacactaaattctgagaatgcgcattactcaacatatttgacgcgcaaatatctcgtagcgaaaaatacagtaaccctttaaatgactattgtagtgtcgatttacgggctcgattttcgaaacgaatatatgctcgaattgtgacaacgaattttaatttgtcatttttgtgttttcttttgatatttttgatcaattaataaattatttccgtaaacagacaccagcgctacagtactcttttaaagagttacagtagttttcgcttcaagatattttgaaaagaattttaaacattttgaaaaaaaatcatctaacatgtgccaaaacgcttttttcaagtttcgcagattttttgatttttttcattcaagatatgcttattaacacatataattatcattaatgtgaatttcttgtagaaattttgggcttttcgttctagtatgctctacttttgaaattgctcaacgaaaaaatcatgtggtttgttcatatgaatgacgaaaaatagcaattttttatatattttcccctattcatgttgtgcagaaaaatagtaaaaaagcgcatgcatttttcgacattttttacatcgaacgacagctcacttcacatgctgaagacgagagacgcggagaaataccacacatctttctgcgtctctcgtcttcagcatgtgaaatgggatctcggtcgatgtaaaaaaatgtcgaataatgtaaaaaatgcatgcgtttttttacacttttctgcacaaatgaatagggggaaaatgtattaaaatacattttttgtatttttcaacatcacatgattaaccccattattttttcgttgagcaacttaaaaagtagagaatattagagcgaaaaccaaaatttcttcaagatattacctttattgataattatagatgttaataagcatatcttgaatgaaagtcagcaaaaatatgtgcgaaacacctgaaaaaaatcaaaaattctgcgaaaattgaaaaaatgcattaaaatacatttttgcatttttctacatcacatgaatgtagaaaattaaaagggaaatcaaaatttctagaggatataattgaatgaaacattgcgaaattaaaatgtgcgaaacgtcaaaaaagaggaaatttgggtatcaaaatcgatcctaaaaccaacacatttcagcatccgccaactcttcattcaccggatgctcttctctcggatacagttcaagtcgtaatcgctcattcagcaaagcttctggaccaactcaatacatattccatgaagaggatatgaactttgtcgatgcaccaaccataagccgtgttttcgacgagaaaaccatgtacagaaacttctcgagtcctcgtggaatgtgcctcatcataaataatgaacactttgagcagatgccaacacggaatggtaccaaggccgacaaggacaatcttaccaatttgttcagatgcatgggctatacggttatttgcaaggacaatctgacgggaagggtacggcgaaattatattacccaaacgcgaaatttgccattttgcgccgaaaatgtggcgcccggtctcgacacgacaatttgtgttaaatgcaaaaatgtataattttgcaaaaaacaaaattttgaacttccgcgaaaatgatttacctagtttcgaaattttcgttttttccggctacattatgtgttttttcttagtttttctataatatttgatgtaaaaaaccgtttgtaaattttcagacaattttccgcatacaaaacttgatagcacgaaatcaattttctgaattttcaaaattatccaaaaatgcacaatttaaaatttgtgaaaattggcaaacggtgtttcaatatgaaatgtatttttaaaaactttaaaaaccactccggaaaagcaataaaaatcaaaacaacgtcacaattcaaattcaaaagttattcatccgatttgtttatttttgcaaaatttgaaaaaatcatgaaggatttagaaaagttttataacattttttctagatttttcaaaattttttttaacaaatcgagaaaaagagaatgaaaaatcgattttaaaaatatccacagcttcgagagtttgaaattacagtactccttaaaggcgcacaccccatttgcattggaccaaaaatttgtcgtgtcgagaccaggtaccgtagtttttgtcgcaaaaattgcaccattggacaataaaccttcctaatcaccaaaaagtaaaattgaaatcttcgaaaagccaaaaaattcaaaaaaaaagtcgaatttcgattttttttttggttttttggtcccaaaaaccaaaaaaatcaattttctgcaaaataccaaaaagaaacccgaaaaaatttcccagccttgttcctaatgtaaactgatatttaatttccagggaatgctcctgacaattcgagactttgccaaacacgaatcacacggagattctgcgatactcgtgattctatcacacggagaagagaatgtgattattggagttgatgatataccgattagtacacacgagatatatgatcttctcaacgcggcaaatgctccccgtctggcgaataagccgaaaatcgtttttgtgcaggcttgtcgaggcggttcgttttttattttaattttaatataaatattttaaataaattcattttcagaacgtcgtgacaatggattcccagtcttggattctgtcgacggagttcctgcatttcttcgtcgtggatgggacaatcgagacgggccattgttcaattttcttggatgtgtgcggccgcaagttcaggttgcaatttaatttcttgaatgagaatattccttcaaaaaatctaaaatagatttttattccagaaagtcccgatcgaaaaattgcgatataattacgaaatttgtgataaaatgacaaaccaatcagcatcgtcgatctccgcccacttcatcggattggtttgaaagtgggcggagtgaattgctgattggtcgcagttttcagtttagagggaatttaaaaatcgccttttcgaaaattaaaaattgattttttcaattttttcgaaaaatattccgattattttatattctttggagcgaaagccccgtcctgtaaacatttttaaatgataattaataaatttttgcagcaagtgtggagaaagaagccgagccaagctgacattctgattgcatacgcaacgacagctcaatatgtttcgtggagaaacagtgctcgtggatcatggttcattcaagccgtctgtgaagtgttctcgacacacgcaaaggatatggatgttgttgagctgctgactgaagtcaataagaaggtcgcttgtggatttcagacatcacagggatcgaatattttgaaacagatgccagaggtacttgaaacaaacaatgcatgtctaacttttaaggacacagaaaaataggcagaggctccttttgcaagcctgccgcgcgtcaacctagaattttagtttttagctaaaatgattgattttgaatattttatgctaatttttttgcgttaaattttgaaatagtcactatttatcgggtttccagtaaaaaatgtttattagccattggattttactgaaaacgaaaatttgtagtttttcaacgaaatttatcgatttttaaatgtaaaaaaaaatagcgaaaattacatcaaccatcaagcatttaagccaaaattgttaactcatttaaaaattaattcaaagttgtccacgagtattacacggttggcgcgcggcaagtttgcaaaacgacgctccgcctctttttctgtgcggcttgaaaacaagggatcggtttagatttttccccaaaatttaaattaaatttcagatgacatcccgcctgctcaaaaagttctacttttggccggaagcacgaaactctgccgtctaaaattcactcgtgattcattgcccaattgataattgtctgtatcttctcccccagttctctttcgcccaattagtttaaaaccatgtgtatattgttatcctatactcatttcactttatcattctatcatttctcttcccattttcacacatttccatttctctacgataatctaaaattatgacgtttgtgtctcgaacgcataataattttaataactcgttttgaatttgattagttgttgtgcccagtatatatgtatgtactatgcttctatcaacaaaatagtttcatagatcatcaccccaaccccaccaacctaccgtaccatattcatttttgccgggaatcaatttcgattaattttaacctattttttcgccacaaaaaatctaatatttgaattaacgaatagcattcccatctctcccgtgccggaatgcctcccggccttttaaagttcggaacatttggcaattatgtataaatttgtaggtcccccccatcatttcccgcccatcatctcaaattgcattcttttttcgccgtgatatcccgattctggtcagcaaagatct

SEQ ID NO: 337 - protein, 277 aa, Homo sapiens
  Caspase-3 precursor  C14.003
MENTENSVDSKSIKNLEPKIIHGSESMDSGISLDNSYKMDYPEMGLCIIINNKNFHKSTGMTSRSGTDVDAANLRETFRNLKYEVRNKNDLTREEIVELMRDVSKEDHSKRSSFVCVLLSHGEEGIIFGTNGPVDLKKITNFFRGDRCRSLTGKPKLFIIQACRGTELDCGIETDSGVDDDMACHKIPVEADFLYAYSTAPGYYSWRNSKDGSWFIQSLCAMLKQYADKLEFMHILTRVNRKVATEFESFSFDATFHAKKQIPCIVSMLTKELYFYH

SEQ ID NO: 338 - DNA, 2635 bp, Homo sapiens
  Caspase-3 precursor	C14.003
gaattcggcacgaggggtgctattgtgaggcggttgtagaagagtttcgtgagtgctcgcagctcatacctgtggctgtgtatccgtggccacagctggttggcgtcgccttgaaatcccaggccgtgaggagttagcgagccctgctcacactcggcgctctggttttcggtgggtgtgccctgcacctgcctcttcccccattctcattaataaaggtatccatggagaacactgaaaactcagtggattcaaaatccattaaaaatttggaaccaaagatcatacatggaagcgaatcaatggactctggaatatccctggacaacagttataaaatggattatcctgagatgggtttatgtataataattaataataagaattttcataaaagcactggaatgacatctcggtctggtacagatgtcgatgcagcaaacctcagggaaacattcagaaacttgaaatatgaagtcaggaataaaaatgatcttacacgtgaagaaattgtggaattgatgcgtgatgtttctaaagaagatcacagcaaaaggagcagttttgtttgtgtgcttctgagccatggtgaagaaggaataatttttggaacaaatggacctgttgacctgaaaaaaataacaaactttttcagaggggatcgttgtagaagtctaactggaaaacccaaacttttcattattcaggcctgccgtggtacagaactggactgtggcattgagacagacagtggtgttgatgatgacatggcgtgtcataaaataccagtggatgccgacttcttgtatgcatactccacagcacctggttattattcttggcgaaattcaaaggatggctcctggttcatccagtcgctttgtgccatgctgaaacagtatgccgacaagcttgaatttatgcacattcttacccgggttaaccgaaaggtggcaacagaatttgagtccttttcctttgacgctacttttcatgcaaagaaacagattccatgtattgtttccatgctcacaaaagaactctatttttatcactaaagaaatggttggttggtggttttttttagtttgtatgccaagtgagaagatggtatatttggtactgtatttccctctcattttgacctactctcatgctgcagagggtactttaagacatactccttccatcaaatagaaccactatgaagctacctcaaacttccagtcaggtagttgcaattgaattaaattaggaataaataaaaatggatactggtgcagtcattatgagaggcaatgattgttaatttacagctttcatgattagcaagttacagtgatgctgtgctatgaattttcaagtaattgtgaaaaagttaaacattgaagtaatgaatttttatgatattccccccacttaagactgtgtattctagttttgtcaaactgtagaaatgatgatgtggaagaacttaggcatctgtgggcatggtcaaaggctcaaacctttattttagaattgatatacacggatgacttaactgcattttagaccatttatctgggattatggttttgtgatgtttgtcctgaacacttttgttgtaaaaaaataataataataatgtttaatattgagaaagaaactaatattttatgtgagagaaagtgtgagcaaactaacttgacttttaaggctaaaacttaacattcatagaggggtggagttttaactgtaaggtgctacaatgcccctggatctaccagcataaatatcttctgatttgtccctatgcatatcagttgagcttcatataccagcaatatatctgaagagctattatataaaaaccccaaactgttgattattagccaggtaatgtgaataaattctataggaacatatgaaaatacaacttaaataataaacagtggaatataaggaaagcaataaatgaatgggctgagctgcctgtaacttgagagtagatggtttgagcctgagcagagacatgactcagcctgttccatgaaggcagagccatggaccacgcaggaagggcctacagcccatttctccatacgcactggtatgtgtggatgatgctgccagggcgccatcgccaagtaagaaagtgaagcaaatcagaaacttgtgaagtggaaatgttctaaaggtggtgaggcaataaaaatcatagtactctttgtagcaaaattcttaagtatgttattttctgttgaagtttacaatcaaaggaaaatagtaatgttttatactgtttactgaaagaaaaagacctatgagcacataggactctagacggcatccagccggaggccagagctgagcactcagcccgggaggcaggctccaggcctcagcaggtgcggagccgtcactgcaccaagtctcactggctgtcagtatgacatttcacgggagatttcttgttgctcaaaaaatgagctcgcatttgtcaatgacagtttcttttttcttactagacctgtaacttttgtaaatacacacagcatgtaatggtatcttaaagtgtgtttctatgtgacaattttgtacaaatttgttattttccatttttatttcaaaatatacattcaaacttaaaatt

SEQ ID NO: 339 - protein, 303 aa, Homo sapiens
MADDQGCIEEQGVEDSANEDSVDAKPDRSSFVPSLFSKKKKNVTMRSIKTTRDRVPTYQYNMNFEKLGKCIIINNKNFDKVTGMGVRNGTDKDAEALFKCFRSLGFDVIVYNDCSCAKMQDLLKKASEEDHTNAACFACILLSHGEENVIYGKDGVTPIKDLTAHFRGDRCKTLLEKPKLFFIQACRGTELDDGIQADSGPINDTDANPRYKIPVEADFLFAYSTVPGYYSWRSPGRGSWFVQALCSILEEHGKDLEIMQILTRVNDRVARHFESQSDDPHFHEKKQIPCVVSMLTKELYFSQ

SEQ ID NO: 340 - DNA, 912 bp, Homo sapiens
  Caspase-7 precursor	C14.004
atggcagatgatcagggctgtattgaagagcagggggttgaggattcagcaaatgaagattcagtggatgctaagccagaccggtcctcgtttgtaccgtccctcttcagtaagaagaagaaaaatgtcaccatgcgatccatcaagaccacccgggaccgagtgcctacatatcagtacaacatgaattttgaaaagctgggcaaatgcatcataataaacaacaagaactttgataaagtgacaggtatgggcgttcgaaacggaacagacaaagatgccgaggcgctcttcaagtgcttccgaagcctgggttttgacgtgattgtctataatgactgctcttgtgccaagatgcaagatctgcttaaaaaagcttctgaagaggaccatacaaatgccgcctgcttcgcctgcatcctcttaagccatggagaagaaaatgtaatttatgggaaagatggtgtcacaccaataaaggatttgacagcccactttaggggggatagatgcaaaacccttttagagaaacccaaactcttcttcattcaggcttgccgagggaccgagcttgatgatgccatccaggccgactcggggcccatcaatgacacagatgctaatcctcgatacaagatcccagtggaagctgacttcctcttcgcctattccacggttccaggctattactcgtggaggagcccaggaagaggctcctggtttgtgcaagccctctgctccatcctggaggagcacggaaaagacctggaaatcatgcagatcctcaccagggtgaatgacagagttgccaggcactttgagtctcagtctgatgacccacacttccatgagaagaagcagatcccctgtgtggtctccatgctcaccaaggaactctacttcagtcaatag

SEQ ID NO: 341 - protein, 293 aa, Homo sapiens
  Caspase-6 precursor  C14.005
MSSASGLRRGHPAGGEENMTETDAFYKREMFDPAEKYKMDHRRRGIALIFNHERFFWHLTLPERRGTCADRDNLTRRFSDLGFEVKCFNDLKAEELLLKIHEVSTVSHADADCFVCVFLSHGEGNHIYAYDAKIEIQTLTGLFKGDKCHSLVGKPKIFIIQACRGNQHDVPVIPLDVVDNQTEKLDTNITEVDAASVYTLPAGADFLMCYSVAEGYYSHRETVNGSWYIQDLCEMLGKYGSSLEFTELLTLVNRKVSQRRVDFCKDPSAIGKKQVPCFASMLTKKLHFFPKSN

SEQ ID NO: 342 - DNA, 1545 bp, Homo sapiens
  Caspase-6 precursor	C14.005
ccgagggcggggccgggcccgggagcctgtggcttcaggaagaggagggcaaggtgtctggctgcgcgtttggctgcaatgagctcggcctcggggctccgcagggggcacccggcaggtggggaagaaaacatgacagaaacagatgccttctataaaagagaaatgtttgatccggcagaaaagtacaaaatggaccacaggaggagaggaattgctttaatcttcaatcatgagaggttcttttggcacttaacactgccagaaaggcggcgcacctgcgcagatagagacaatcttacccgcaggttttcagatctaggatttgaagtgaaatgctttaatgatcttaaagcagaagaactactgctcaaaattcatgaggtgtcaactgttagccacgcagatgccgattgctttgtgtgtgtcttcctgagccatggcgaaggcaatcacatttatgcatatgatgctaaaatcgaaattcagacattaactggcttgttcaaaggagacaagtgtcacagcctggttggaaaacccaagatatttatcatccaggcatgtcggggaaaccagcacgatgtgccagtcattcctttggatgtagtagataatcagacagagaagttggacaccaacataactgaggtggatgcagcctccgtttacacgctgcctgctggagctgacttcctcatgtgttactctgttgcagaaggatattattctcaccgggaaactgtgaacggctcatggtacattcaagatttgtgtgagatgttgggaaaatatggctcctccttagagttcacagaactcctcacactggtgaacaggaaagtttctcagcgccgagtggacttttgcaaagacccaagtgcaattggaaagaagcaggttccctgttttgcctcaatgctaactaaaaagctgcatttctttccaaaatctaattaattaatagaggctatctaatttcacactctgtattgaaaatggctttctcagccaggcgtggttactcacacctgtaatcccagcactttgggagtccaaggtgggcggatcacctgaggtcgggagttcgagaccagcctgaccaacatggcagaagccccgcctctactaaaaatgcaaaaaaaaatttagctaggcatggcggcgcatgcctgcaatcccagctacttggaaggctgaggcaggagaatcacttgaacccaggaggtggaggctgcggtgagccgagcattgcgccattgcactccagcctgggcaacgagtgaaactccgtctcaaaaaaaaagaaaatgtctttctcttccttttatataaatatcgttagggtgaagcattatggtctaatgattcaaatgttttaaagtttaatgcctagcagagaactgccttaaaaaaaaaaagttcatgttggccatggtgaaagggtttgatatggagaaacaaaatcctcaggaaattagataaataaaaatttataagcatttgtattattttttaataaactgcagggttacacaaaaatct

SEQ ID NO: 343 - protein, 452 aa, Mus musculus
  Caspase-2 precursor  C14.006
MAAPSGRSQSSLHRKGLMAADRRSRILAVCGMHPDHQETLKKNRVVLAKQLLLSELLEHLLEKDIITLEMRELIQAKGGSFSQNVELLNLLPKRGPQAFDAFCEALRETRQGHLEDLLLTTLSDIQHVLPPLSCDYDTSLPFSVCESCPPHKQLRLSTDATEHSLDNGDGPPCLLVKPCTPEFYQAHYQLAYRLQSQPRGLALVLSNVHFTGEKDLEFRSGGDVDHTTLVTLFKLLGYNVHVLHDQTAQEMQEKLQNFAQLPAHRVTDSCVVALLSHGVEGGIYGVDGKLLQLQEVFRLFDNANCPSLQNKPKMFFIQACRGDETDRGVDQQDGKNHTQSPGCEESDAGKEELMKMRLPTRSDMICGYACLKGNAAMRNTKRGSWYIEALTQVFSERACDMHVADMLVKVNALIKEREGYAPGTEFHRCKEMSEYCSTLCQQLYLFPGYPPT

SEQ ID NO: 344 - DNA, 3395 bp, Mus musculus
  Caspase-2 precursor	C14.006
ctggaaatggcggcgccgagcgggaggtcgcagtcctccctgcacaggaaggggctgatggcggctgacaggaggagcaggattttggcagtgtgtggaatgcatcctgaccaccaggaaacactgaaaaagaatcgagtggtgctggccaagcagctgctgctgagcgagctgttagaacacctcctagagaaggacattatcactttggaaatgagggagctcatccaggccaaagggggcagtttcagccagaatgtggaactcctcaacctgctgccaaagagaggaccccaggcttttgatgccttctgtgaagccctgcgggagaccaggcagggtcacttggaagacttactgctcacaaccctctcagatattcagcacgtactcccaccgttgagctgtgactatgacacaagtctccctttctcggtgtgtgagtcctgccctcctcacaagcagctccgcctatccacagatgctacggaacactccttagataatggtgatggtcctccctgtcttctggtgaagccatgcactcctgagttttaccaggcacactaccagctggcctataggttgcaatctcagccccgtggcttggcactggtgctgagcaatgtgcacttcactggagagaaagacctggaattccgctctggaggggatgtggaccacactactctagtcaccctcttcaagcttttgggctacaatgtccatgtgctacatgaccagaccgcacaggaaatgcaagagaaacttcagaattttgcacagttacctgcacaccgggtcacagactcctgcgtagtggcactcctctcacatggtgtggaaggtggcatctatggtgtagatggcaaactgcttcagctccaagaggtttttcgactttttgacaatgctaactgtccaagtctacagaacaagccaaaaatgttcttcatccaagcatgtcgtggagatgagacagatagaggtgtcgaccagcaagatggaaagaaccacacacaatcccctggatgtgaggagagtgatgctggcaaagaggagttgatgaagatgagactgcctactcgctcagacatgatatgtggctatgcttgccttaaaggtaatgctgccatgcggaacaccaaacggggttcctggtacattgaggccctcactcaggtgttctctgaaagagcttgtgacatgcacgtggccgacatgcttgttaaggtgaatgcccttatcaaggagcgtgaaggctatgcccctggcacagaattccaccgatgcaaggagatgtctgagtactgtagtactctgtgccagcaactctacctgttcccaggctacccacccacgtgatgccgcctgctattcctgctgttggaggccactggaccactgggggcacaatggagacttctcttcagaatggtttttgttctgtctaccctctcagggatatgagattctcccaggcttgtttcctgtcagccatctctgtctttgggtatgaaacataaggatggctcctccggtgtcgtgttctctacctatagagccagctctgaatggatgtgttaccagaagcattttagctacagcctagaaaatgacattgtgaacacagtattattgtgggaagagggcatttggatttctcaatgtttgtgatatttttgttcccaaggcatcttaggagtacttggatcatagctttttttttttttcctaaatcagttaaggagtctcagagatcatctccttttttttccatatctacaacctcatttttcccacagtggagatttggaagatgtcccaatttaatgtaggtgttttcatctgtcatgaagggacagatgagatcctactacttgcgaagtttctatgcatacctttaagttcaggccctaggtgaaggacagtccctcagcctttccattggttcctttgtgttcagtgcacccagcctttgaacagagcctagggtctgtatgccatgacactggaagtcatagaaatttccctggtcatgctttgtttgaactgtcactgaatgaaccttatcgggcataactacatgaaaatgcagtgacagctgagtgtgctgtgtctcacactatcacccgtcatcaggatgtctctccttccttactgtggcttctgcatgcacttacactgtacttgacggctggcctccagggtctctcttgctttgtactggttcccctctttaccttcaccattcgctgcttctgccaagtctgtgaagccgtcctttgtaggatgtttcttgccacttacgctgtactgtagttgcttattctttctgccttctgcttcagcgtgaggcttctttggttttctgtggcagcgtctcccttctcattgtttctctgtgttttagtggggatagtaccatatgtgatataacctagaagcacttgtctctgctcttatgaaacttgcttattcttgaaaaccttctgcatttccattttttcctctcttccaatttattctccatgtaacagagtagtttggtttttaaaatatctggtgatgtcattctcttgcttagaacactagcttcctgttacgcttcatctaaaatgcaaattcttacacccagcttacgagatctggctcataccttccctttggatctcattaaatggtgatttctcactatgctccagcccctcttaggtcctcatctccgtcttgcaggtgttctgaactctcctttggctagtctctgatttttgagtctggcggaggcctcttgaccatgctgcccatgctgtctactgtgcctccttatgagggcatcatgttggtctctgttgtgcttactgcaggctgtaatggcacttttgcttgtttcacttgttccctctgaggctgaatgctccaagagagtgggaactgtgcttcttacttactgatatccagtaactggcacttactaggtcttcatgaatgtttcctgagtaaaggaaggagaccagcagctaaccttagttagagcctaccttttgcagtttctaaattgctattatagtgtacagttcaattagtatatgggtttttttttccaggtgttttatttttatccactgttttgttgttgtttttttatattttctacatatcacgtgtgagacaacttctttcacatctccatagtgcccagcaaatttgaggcctatggtagttgaggtgctcaactaatgtttgttgtatgaaccaagtggtttgaagacttgctgccaaattctgccttttgggtcagtataggatgcataagtggtagaatcttcacacttcccactgccaagattttgtattgccatcaggtgccaaataaatgttgatacttattactg

SEQ ID NO: 345 - protein, 377 aa, Homo sapiens
  Caspase-4 precursor  C14.007
MAEGNHRKKPLKVLESLGKDFLTGVLDNLVEQNVLNWKEEEKKKYYDAKTEDKVRVMADSMQEKQRMAGQMLLQTFFNIDQISPNKKAHPNMEAGPPESGESTDALKLCPHEEFLRLCKERAEEIYPIKERNNRTRLALIICNTEFDHLPPRNGADFDITGMKELLEGLDYSVDVEENLTARDMESALRAFATRPEHKSSDSTFLVLMSHGILEGICGTVHDEKKPDVLLYDTIFQIFNNRNCLSLKDKPKVIIVQACRGANRGELWVRDSPASLEVASSQSSENLEEDAVYKTHVEKDFIAFCSSTPHNVSWRDSTMGSIFITQLITCFQKYSWCCHLEEVFRKVQQSFETPRAKAQMPTIERLSMTRYFYLFPGN

SEQ ID NO: 346 - DNA, 1291 bp, Homo sapiens
  Caspase-4 precursor	C14.007
gctctttccaacgctgtaaaaaaggacagaggctgttccctatggcagaaggcaaccacagaaaaaagccacttaaggtgttggaatccctgggcaaagatttcctcactggtgttttggataacttggtggaacaaaatgtactgaactggaaggaagaggaaaaaaagaaatattacgatgctaaaactgaagacaaagttcgggtcatggcagactctatgcaagagaagcaacgtatggcaggacaaatgcttcttcaaaccttttttaacatagaccaaatatcccccaataaaaaagctcatccgaatatggaggctggaccacctgagtcaggagaatctacagatgccctcaagctttgtcctcatgaagaattcctgagactatgtaaagaaagagctgaagagatctatccaataaaggagagaaacaaccgcacacgcctggctctcatcatatgcaatacagagtttgaccatctgcctccgaggaatggagctgactttgacatcacagggatgaaggagctacttgagggtctggactatagtgtagatgtagaagagaatctgacagccagggatatggagtcagcgctgagggcatttgctaccagaccagagcacaagtcctctgacagcacattcttggtactcatgtctcatggcatcctggagggaatctgcggaactgtgcatgatgagaaaaaaccagatgtgctgctttatgacaccatcttccagatattcaacaaccgcaactgcctcagtctgaaggacaaacccaaggtcatcattgtccaggcctgcagaggtgcaaaccgtggggaactgtgggtcagagactctccagcatccttggaagtggcctcttcacagtcatctgagaacctggaggaagatgctgtttacaagacccacgtggagaaggacttcattgctttctgctcttcaacgccacacaacgtgtcctggagagacagcacaatgggctctatcttcatcacacaactcatcacatgcttccagaaatattcttggtgctgccacctagaggaagtatttcggaaggtacagcaatcatttgaaactccaagggccaaagctcaaatgcccaccatagaacgactgtccatgacaagatatttctacctctttcctggcaattgaaaatggaagccacaagcagcccagccctccttaatcaacttcaaggagcaccttcattagtacagcttgcatatttaacattttgtatttcaataaaagtgaagacaaaaaaaaaa

SEQ ID NO: 347 - protein, 418 aa, Homo sapiens
  Caspase-5 precursor   C14.008
MFKGILQSGLDNFVINHMLKNNVAGQTSIQTLVPNTDQKSTSVKKDNHKKKTVKMLEYLGKDVLHGVFNYLAKHDVLTLKEEEKKKYYDAKIEDKALILVDSLRKNRVAHQMFTQTLLNMDQKITSVKPLLQIEAGPPESAESTNILKLCPREEFLRLCKKNHDEIYPIKKREDRRRLALIICNTKFDHLPARNGAHYDIVGMKRLLQGLGYTVVDEKNLTARDMESVLRAFAARPEHKSSDSTFLVLMSHGILEGICGTAHKKKKPDVLLYDTIFQIFNNRNCLSLKDKPKVIIVQACRGEKHGELWVRDSPASLAVISSQSSENLEADSVCKIHEEKDFIAFCSSTPHNVSWRDRTRGSIFITELITCFQKYSCCCHLMEIFRKVQKSFEVPQAKAQMPTIERATLTRDFYLFPGN

SEQ ID NO: 348 - DNA, 1400 bp, Homo sapiens
  Caspase-5 precursor	C14.008
cggcaaaaaaaaaaggcgtaagaattttgaagctatgttcaaaggtatccttcagagtggattggataacttcgtgataaaccacatgctaaagaacaacgtggctggacaaacatctatccagaccctagtacctaatacggatcaaaagtcgaccagtgtaaaaaaagacaaccacaaaaaaaaaacagttaagatgttggaatacctgggcaaagatgttcttcatggtgtttttaattatttggcaaaacacgatgttctgacattgaaggaagaggaaaagaaaaaatattatgatgccaaaattgaagacaaggccctgatcttggtagactctttgcgaaagaatcgcgtggctcatcaaatgtttacccaaacacttctcaatatggaccaaaagatcaccagtgtaaaacctcttctgcaaatcgaggctggaccacctgagtcagcagaatctacaaatatactcaaactttgtcctcgtgaagaattcctgagactgtgtaaaaaaaatcatgatgagatctatccaataaaaaagagagaggaccgcagacgcctggctctcatcatatgcaatacaaagtttgatcacctgcctgcaaggaatggggctcactatgacatcgtggggatgaaaaggctgcttcaaggcctgggctacactgtggttgacgaaaagaatctcacagccagggatatggagtcagtgctgagggcatttgctgccagaccagagcacaagtcctctgacagcacgttcttggtactcatgtctcatggcatcctagagggaatctgcggaactgcgcataaaaagaaaaaaccggatgtgctgctttatgacaccatcttccagatattcaacaaccgcaactgcctcagtctaaaggacaaacccaaggtcatcattgtccaggcctgcagaggtgaaaaacatggggaactctgggtcagagactctccagcatccttggcagtcatctcttcacagtcatctgagaacctggaggcagattctgtttgcaagatccacgaggagaaggacttcattgctttctgttcttcaacaccacataacgtgtcctggagagaccgcacaaggggctccatcttcattacggaactcatcacatgcttccagaaatattcttgctgctgccacctaatggaaatatttcggaaggtacagaaatcatttgaagttccacaggctaaagcccagatgcccaccatagaacgagcaaccttgacaagagatttctacctctttcctggcaattgaaaatgaaaccacaggcagcccagccctcctctgtcaacatcaaagagcacatttaccagtatagcttgcatagtcaatatttggtatttcaataaaagtaaagactgta

SEQ ID NO: 349 - protein, 479 aa, Homo sapiens
  Caspase-8 precursor   C14.009
MDFSRNLYDIGEQLDSEDLASLKFLSLDYIPQRKQEPIKDALMLFQRLQEKRMLEESNLSFLKELLFRINRLDLLITYLNTRKEEMERELQTPGRAQISAYRVMLYQISEEVSRSELRSFKFLLQEEISKCKLDDDMNLLDIFIEMEKRVILGEGKLDILKRVCAQINKSLLKIINDYEEFSKERSSSLEGSPDEFSNGEELCGVMTISDSPREQDSESQTLDKVYQMKSKPRGYCLIINNHNFAKAREKVPKLHSIRDRNGTHLDAGALTTTFEELHFEIKPHDDCTVEQIYEILKIYQLMDHSNMDCFICCILSHGDKGIIYGTDGQEAPIYELTSQFTGLKCPSLAGKPKVFFIQACQGDNYQKGIPVETDSEEQPYLEMDLSSPQTRYIPDEADFLLGMATVNNCVSYRNPAEGTWYIQSLCQSLRERCPRGDDILTILTEVNYEVSNKDDKKNMGKQMPQPTFTLRKKLVFPSD

SEQ ID NO: 350 - DNA, 2887 bp, Homo sapiens
  Caspase-8 precursor	C14.009
gattctgcctttctgctggagggaagtgttttcacaggttctcctccttttatcttttgtgttttttttcaagccctgctgaatttgctagtcaactcaacaggaagtgaggccatggagggaggcagaagagccagggtggttattgaaagtagaagaaacttcttcctgggagcctttcccacccccttccctgctgagcacgtggagttaggcaggttaggggactcggagactgcgatggtgccaggaaagggtggagcggattatattctcctgccttttaaaaagatggacttcagcagaaatctttatgatattggggaacaactggacagtgaagatctggcctccctcaagttcctgagcctggactacattccgcaaaggaagcaagaacccatcaaggatgccttgatgttattccagagactccaggaaaagagaatgttggaggaaagcaatctgtccttcctgaaggagctgctcttccgaattaatagactggatttgctgattacctacctaaacactagaaaggaggagatggaaagggaacttcagacaccaggcagggctcaaatttctgcctacagggtcatgctctatcagatttcagaagaagtgagcagatcagaattgaggtcttttaagtttcttttgcaagaggaaatctccaaatgcaaactggatgatgacatgaacctgctggatattttcatagagatggagaagagggtcatcctgggagaaggaaagttggacatcctgaaaagagtctgtgcccaaatcaacaagagcctgctgaagataatcaacgactatgaagaattcagcaaagagagaagcagcagccttgaaggaagtcctgatgaattttcaaatggggaggagttgtgtggggtaatgacaatctcggactctccaagagaacaggatagtgaatcacagactttggacaaagtttaccaaatgaaaagcaaacctcggggatactgtctgatcatcaacaatcacaattttgcaaaagcacgggagaaagtgcccaaacttcacagcattagggacaggaatggaacacacttggatgcaggggctttgaccacgacctttgaagagcttcattttgagatcaagccccacgatgactgcacagtagagcaaatctatgagattttgaaaatctaccaactcatggaccacagtaacatggactgcttcatctgctgtatcctctcccatggagacaaaggcatcatctatggcactgatggacaggaggcccccatctatgagctgacatctcagttcactggtttgaagtgcccttcccttgctggaaaacccaaagtgttttttattcaggcttgtcagggggataactaccagaaaggtatacctgttgagactgattcagaggagcaaccctatttagaaatggatttatcatcacctcaaacgagatatatcccggatgaggctgactttctgctggggatggccactgtgaataactgtgtttcctaccgaaaccctgcagagggaacctggtacatccagtcactttgccagagcctgagagagcgatgtcctcgaggcgatgatattctcaccatcctgactgaagtgaactatgaagtaagcaacaaggatgacaagaaaaacatggggaaacagatgcctcagcctactttcacactaagaaaaaaacttgtcttcccttctgattgatggtgctattttgtttgttttgttttgttttgtttttttgagacagaatctcgctctgtcgcccaggctggagtgcagtggcgtgatctcggctcaccgcaagctccgcctcccgggttcacgccattctcctgcctcagcctcccgagtagctgggactacaggggcccgccaccacacctggctaattttttaaaaatatttttagtagagacagggtttcactgtgttagccagggtggtcttgatctcctgacctcgtgatccacccacctcggcctcccaaagtgctgggattacaggcgtgagccaccgcgcctggccgatggtactatttagatataacactatgtttatttactaattttctagattttctactttattaattgttttgcacttttttataagagctaaagttaaataggatattaacaacaataacactgtctcctttctcttacgcttaaggctttgggaatgtttttagctggtggcaataaataccagacacgtacaaaatccagctatgaatatagagggcttatgattcagattgttatctatcaactataagcccactgttaatattctattaactttaattctctttcaaagctaaattccacactaccacattaaaaaaattagaaagtagccacgtatggtggctcatgtctataatcccagcactttgggaggttgaggtgggaggatttgcttgaacccaagaggtccaaggctgcagtgagccatgttcacaccgctgcactcaagcttgggtgacagagcaagaccccgtccccaaaaaaattttttttttaataaacccaaatttgtttgaaaacttttaaaaattcaaatgatttttacaagttttaaataagctctccccaaacttgctttatgccttcttattgcttttatgatatatatatgcttggctaactatatttgctttttgctaacaatgctctggggtctttttatgcatttgcatttgctctttcatctctgcttggattattttaaatcattaggaattaagttatctttaaaatttaagtatcttttttccaaaacattttttaatagaataaaatataatttgatcttaaaaaaaaaaaaaaaaaaaaaaaaaaaaaaaaaaaaaaaa

SEQ ID NO: 351 - protein, 416 aa, Homo sapiens
  Caspase-9 precursor C14.010
MDEADRRLLRRCRLRLVEELQVDQLWDALLSRELFRPHMIEDIQRAGSGSRRDQARQLIIDLETRGSQALPLFISCLEDTGQDMLASFLRTNRQAAKLSKPTLENLTPVVLRPEIRKPEVLRPETPRPVDIGSGGFGDVGALESLRGNADLAYILSMEPCGHCLIINNVNFCRESGLRTRTGSNIDCEKLRRRFSSLHFMVEVKGDLTAKKMVLALLELAQQDHGALDCCVVVILSHGCQASHLQFPGAVYGTDGCPVSVEKIVNIFNGTSCPSLGGKPKLFFIQACGGEQKDHGFEVASTSPEDESPGSNPEPDATPFQEGLRTFDQLDAISSLPTPSDIFVSYSTFPGFVSWRDPKSGSWYVETLDDIFEQWAHSEDLQSLLLRVANAVSVKGIYKQMPGCFNFLRKKLFFKTS

SEQ ID NO: 352 - DNA, 1481 bp, Homo sapiens
  Caspase-9 precursor	C14.010
gccatggacgaagcggatcggcggctcctgcggcggtgccggctgcggctggtggaagagctgcaggtggaccagctctgggacgtcctgctgagccgcgagctgttcaggccccatatgatcgaggacatccagcgggcaggctctggatctcggcgggatcaggccaggcagctgatcatagatctggagactcgagggagtcaggctcttcctttgttcatctcctgcttagaggacacaggccaggacatgctggcttcgtttctgcgaactaacaggcaagcaggaaagttgtcgaagccaaccctagaaaaccttaccccagtggtgctcagaccagagattcgcaaaccagaggttctcagaccggaaacacccagaccagtggacattggttctggaggattcggtgatgtcggtgctcttgagagtttgaggggaaatgcagatttggcttacatcctgagcatggagccctgtggccactgcctcattatcaacaatgtgaacttctgccgtgagtccgggctccgcacccgcactggctccaacatcgactgtgagaagttgcggcgtcgcttctcctcgctgcatttcatggtggaggtgaagggcgacctgactgccaagaaaatggtgctggctttgctggagctggcgcggcaggaccacggtgctctggactgctgcgtggtggtcattctctctcacggctgtcaggccagccacctgcagttcccaggggctgtctacggcacagatggatgccctgtgtcggtcgagaagattgtgaacatcttcaatgggaccagctgccccagcctgggagggaagcccaagctctttttcatccaggcctgtggtggggagcagaaagaccatgggtttgaggtggcctccacttcccctgaagacgagtcccctggcagtaaccccgagccagatgccaccccgttccaggaaggtttgaggaccttcgaccagctggacgccatatctagtttgcccacacccagtgacatctttgtgtcctactctactttcccaggttttgtttcctggagggaccccaagagtggctcctggtacgttgagaccctggacgacatctttgagcagtgggctcactctgaagacctgcagtccctcctgcttagggtcgctaatgctgtttcggtgaaagggatttataaacagatgcctggttgctttaatttcctccggaaaaaacttttctttaaaacatcataaggccagggcccctcaccctgccttatcttgcacccccaaagctttcctgccccaggcctgaaagaggctgaggcctggactttcctgcaactcaaggactttgcagccggcacagggtctgctctttctctgccagtgacagacaggctcttagcagcttccagattgacgacaagtgctgaacagtggaggaagagggacagatgaatgccgtggattgcacgtgg

SEQ ID NO: 353 - protein, 521 aa, Homo sapiens
  Caspase-10 precursor   C14.011
MKSQGQHWYSSSDKNCKVSFREKLLIIDSNLGVQDVENLKFLCIGLVPNKKLEKSSSASDVFEHLLAEDLLSEEDPFFLAELLYIIRQKKLLQHLNCTKEEVERLLPTRQRVSLFRNLLYELSEGIDSENLKDMIFLLKDSLPKTEMTSLSFLAFLEKQGKIDEDNLTCLEDLCKTVVPKLLRNIEKYKREKAIQIVTPPVDKEAESYQGEEELVSQTDVKTFLEALPQESWQNKHAGSNGNRATNGAPSLVSRGMQGASANTLNSETSTKRAAVYRMNRNHRGLCVIVNNHSFTSLKDRQGTHKDAEILSHVFQWLGFTVHIHNNVTKVEMEMVLQKQKCNPAHADGDCFVFCILTHGRFGAVYSSDEALIPIREIMSHFTALQCPRLAEKPKLFFIQACQGEEIQPSVSIEADALNPEQAPTSLQDSIPAEADFLLGLATVPGYVSFRHVEEGSWYIQSLCNHLKKLVPRMLKFLEKTMEIRGRKRTVWGAKQISATSLPTAISAQTPRPPMRRWSSVS

SEQ ID NO: 354 - DNA, 3536 bp, Homo sapiens
  Caspase-10 precursor	C14.011
tgaagtctcttcccaagcaaatgggagcttctttggaccttggagcacacagaggattctactttctttaaaactttgttttcaggcaatttccctgagaaccgtttacttccagaagattggtggagcttgatctgaaggctggccatgaaatctcaaggtcaacattggtattccagttcagataaaaactgtaaagtgagctttcgtgagaagcttctgattattgattcaaacctgggggtccaagatgtggagaacctcaagtttctctgcataggattggtccccaacaagaagctggagaagtccagctcagcctcagatgtttttgaacatctcttggcagaggatctgctgagtgaggaagaccctttcttcctggcagaactcctctatatcatacggcagaagaagctgctgcagcacctcaactgtaccaaagaggaagtggagcgactgctgcccacccgacaaagggtttctctgtttagaaacctgctctacgaactgtcagaaggcattgactcagagaacttaaaggacatgatcttccttctgaaagactcgcttcccaaaactgaaatgacctccctaagtttcctggcatttctagagaaacaaggtaaaatagatgaagataatctgacatgcctggaggacctctgcaaaacagttgtacctaaacttttgagaaacatagagaaatacaaaagagagaaagctatccagatagtgacacctcctgtagacaaggaagccgagtcgtatcaaggagaggaagaactagtttcccaaacagatgttaagacattcttggaagccttaccgagggcagctgtgtacaggatgaatcggaaccacagaggcctctgtgtcattgtcaacaaccacagctttacctccctgaaggacagacaaggaacccataaagatgctgagatcctgagtcatgtgttccagtggcttgggttcacagtgcatatacacaataatgtgacgaaagtggaaatggagatggtcctgcagaagcagaagtgcaatccagcccatgccgacggggactgcttcgtgttctgtattctgacccatgggagatttggagctgtctactcttcggatgaggccctcattcccattcgggagatcatgtctcacttcacagccctgcagtgccctagactggctgaaaaacctaaactctttttcatccaggcctgccaaggtgaagagatacagccttccgtatccatcgaagcagatgctctgaaccctgagcaggcacccacttccctgcaggacagtattcctgccgaggctgacttcctacttggtctggccactgtcccaggctatgtatcctttcggcatgtggaggaaggcagctggtatattcagtctctgtgtaatcatctgaagaaattggtcccaagacatgaagacatcttatccatcctcactgctgtcaacgatgatgtgagtcgaagagtggacaaacagggaacaaagaaacagatgccccagcctgctttcacactaaggaaaaaactagtattccctgtgcccctggatgcactttcaatatagcagagagtttttgttggttcttagacctcaaacgaatcattgggtataacctccagcctcctgcccagcacaggaatcggtggtctccacctgtcattctagaaacaggaaacaccgtgttttctgacacagtcaattctgattttctttttcttttgcaagtctaaatgttagaaaactttctttttttggagatagtctcattctgtcacccagactggagtgcaggggggcaatcacggctcactgtagtctcgacctcccaggctcaagctgtcctcccacctcagcctcccaagtagctgagactacaggtgtgtgtccatgcacagctaactttttattttttttgtggagatggggtttcactatgttgcctaagctggtctcaaactcctgggctcaagcgatcctcccacctcagcttctcaaagttctgggactacaggcatgaaatactgtgcctggcctggggaccaggtgcattttaaggttccttggtgttcaaaaaccacgttcttagcctagattgagcttagattgcctctctagacaactaccccttagttataattctgtgtcccctctgcatgcccttaaacattggacagtgaggtcacagtccacccaccctctctctgatctcccccttcctaagacttctcttttgcacatctagtgaggtgaaaatttggtctatgccaggcccatttcctgcttttgtgtaaggaaggtgctcacataggaagtttttatttggttagagacaggtttccctgtaggaagatgatggctcatttacactcagctgctctgcaagcagaaactttacaacctgatgtcatattccattttggactgggtgcggtgactcatgcctgtaatcccagtactctgggaagccaaggcaggcagatcacttgaggtcaggagttcgagaccagcctggccaatacggcaaaacctcatcattactaaaaacacaaaaattagccaggtgtggcggcgagcacctgtaatcccagctactcgggaggctgagacaggagaatctcttgaatccaggaggcagaggctgtggtgagccaagatgacacaactgcactccagcttgggcaacagggcgagaccttgtttaaaaaaaaaattcaatattggggttggaacatttcagttgccattgacagaacacccaattcaaattgactgaagcaaagaagggaatttattgcctctttcacattgaaacccaggagtggataacactggcttcaggcaaagcttgaatcaggactcaatctacaggccagcacctttctcttggccggatgtcctcagggctggcagatgcagtagactgcagtggacagtccccaccttgttactgctactacactttgctcctctggcccaaggcatgaggagagaggctgtgtcagaaactgaagctgttctcaggatcactgggctcttcttggcagaggggatgtctggcttgcctgaagggagtggctctgtaaggacgccttgatgctttcttcattaagattttgagcatttttacgtacttgagcttttttttttttttttttcaatttctagaggaactttttctctgttaattcctggaactgtattttgaatccttaaaggtgagccctcatagggagatccaaagtcctgtggttaacgccttcatttatagatgaggcagctgaggcctggggatgtgaacaacctgctcacagtcctcatttactggatttgacttcagccaggtgaactggaatgccttggggcgtggaagggcattaggagtgtttcatttgatatgtgaatgctcataaaaaaatgtcaaggaatgaagaacaacaactctcagtggtgcctgcatttataattatttatgtgaaagtcaaattcatgtacagtaaatttgttataagaat

SEQ ID NO: 355 - protein, 373 aa, Mus musculus
  Caspase-11  C14.012
MAENKHPDKPLKVLEQLGKEVLTEYLEKLVQSNVLKLKEEDKQKFNNAERSDKRWVFVDAMKKKHSKVGEMLLQTFFSVDPGSHHGEANLEMEEPEESLNTLKLCSPEEFTRLCREKTQEIYPIKEANGRTRKALIICNTEFKHLSLRYGAKFDIIGMKGLLEDLGYDVVVKEELTAEGMESEMKDFAALSEHQTSDSTFLVLMSHGTLHGICGTMHSEKTPDVLQYDTIYQIFNNCHCPGLRDKPKVIIVQACRGGNSGEMWIRESSKPQLCRGVDLPRNMEADAVKLSHVEKDFIAFYSTTPHHLSYRDKTGGSYFITRLISCFRKHACSCHLFDIFLKVQQSFEKASIHSQMPTIDRATLTRYFYLFPGN

SEQ ID NO: 356 - DNA, 1350 bp, Mus musculus
  Caspase-11	C14.012
tcttcacagtgcgaaagaactgaggctttttctcatggctgaaaacaaacaccctgacaaaccacttaaggtgttggaacagctgggcaaagaagtccttacggagtacctagaaaaattagtacaaagcaatgtactgaaattaaaggaggaagataaacaaaaatttaacaatgctgaacgcagtgacaagcgttgggtttttgtagatgccatgaaaaagaaacacagcaaagtaggtgaaatgcttctccagacattcttcagtgtggacccaggcagccaccatggtgaagctaatctggaaatggaggaaccagaagaatcattgaacactctcaagctttgttcccctgaagagttcacaaggctttgcagagaaaagacacaagaaatttacccaataaaggaggccaatggccgtacacgaaaggctcttatcatatgcaatacagagttcaaacatctctcactgaggtatggggctaaatttgacatcattggtatgaaaggccttcttgaagacttaggctacgatgtggtggtgaaagaggagcttacagcagagggcatggagtcagagatgaaagactttgctgcactctcagaacaccagacatcagacagcacattcctggtgctaatgtctcatggcacactgcatggcatttgtggaacaatgcacagtgaaaaaactccagatgtgctacagtatgataccatctatcagatattcaacaattgccactgtccaggtctacgagacaaacccaaagtcatcattgtgcaggcctgcagaggtgggaactctggagaaatgtggatcagagagtcttcaaaaccccagttgtgcagaggtgtagatctacctaggaatatggaagctgatgctgtcaagctgagccacgtggagaaggacttcattgccttctactctacaaccccacatcacttgtcctaccgagacaaaacaggaggctcttacttcatcactagactcatttcctgcttccggaaacatgcttgctcttgtcatctctttgatatattcctgaaggtgcaacaatcatttgaaaaggcaagtattcattcccagatgcccaccattgatcgggcaaccttgacaagatatttctacctctttcctggcaactgagaacaaagcaacaagcaactgaatctcatttcttcagcttgaagaagtgatcttggccaaggatcacattctattcctgaaattccagaactagtgaaattaaggaaagaatacttatgaattcaagaccagcctaagcaacacagtgggattctgttccatagacaagcaaacaagcaaaaataaaaaaaaaa

SEQ ID NO: 357 - protein, 419 aa, Mus musculus
  Caspase-12 precursor C14.013
MAARRTHERDPIYKIKGLAKDMLDGVFDDLVEKNVLNGDELLKIGESASFILNKAENLVENFLEKTDMAGKIFAGHIANSQEQLSLQFSNDEDDGPQKICTPSSPSESKRKVEDDEMEVNAGLAHESHLMLTAPHGLQSSEVQDTLKLCPRDQFCKIKTERAKEIYPVMEKEGRTRLALIICNKKFDYLFDRDNADTDILNMQELLENLGYSVVLKENLTAQEMETELMQFAGRPEHQSSDSTFLVFMSHGILEGICGVKHRNKKPDVLHDDTIFKIFNNSNCRSLRNKPKILIMQACRGRYNGTIWVSTNKGIATADTDEERVLSCKWNNSITKAHVETDFIAFKSSTPHNISWKVGKTGSLFISKLIDCFKKYCWCYHLEEIFRKVQHSFEVPGELTQMPTIERVSMTRYFYLFPGN

SEQ ID NO: 358 - DNA, 2228 bp, Mus musculus
  Caspase-12 precursor	C14.013
ggcacgagcggcacgagcggcacgagcacagccatggcggccaggaggacacatgaaagagatccaatctacaagatcaaaggtttggccaaggacatgctggatggggtttttgatgacctggtggagaagaatgttttaaatggagatgagttactcaaaataggggaaagtgcgagtttcatcctgaacaaggctgagaatctggttgagaacttcttagagaaaacagacatggcaggaaaaatatttgctggccacattgccaattcccaggaacagctgagtttacaattttctaatgatgaggatgatggacctcagaagatatgtacaccttcttctccatcagaatccaagagaaaagtagaggatgatgaaatggaggtaaatgctggattggcccatgaatcacatctaatgctgacagctcctcatggactccagagctcagaagtccaagatacactgaagctttgtccacgtgatcagttttgtaagataaagacagaaagggcaaaagagatatatccagtgatggagaaggagggacgaacacgtctggctctcatcatctgcaacaaaaagtttgactacctttttgatagagataatgctgatactgacattttgaacatgcaagaactacttgaaaatcttggatactctgtggtgttaaaggaaaaccttacagctcaggaaatggagacagagttaatgcagtttgctggccgtccagagcaccagtcctcagacagcacattcctggtgtttatgtcccatggcatcctggaaggaatctgtggggtgaagcaccgaaacaaaaagccagatgttcttcatgatgacactatcttcaaaattttcaacaactctaactgtcggagtctgagaaacaaacccaagattctcatcatgcaggcctgcagaggcagatataatggaactatttgggtatccacaaacaaagggatagccactgctgatacagatgaggaacgtgtgttgagctgtaaatggaataatagtataacaaaggcccatgtggagacagatttcattgctttcaaatcttctaccccacataatatttcttggaaggtaggcaagactggttccctcttcatttccaaactcattgactgcttcaaaaagtactgttggtgttatcatttggaggaaatttttcgaaaggttcaacactcatttgaggtcccaggtgaactgacccagatgcccactattgagagagtatccatgacacgctatttctacctttttcccgggaattagcacaggcaactctcatgcagttcccagtcaagtattgctgtagctgagaagaaaagaaaattccaagatcccaggatttttaaatgtgtaaaacttttcagttagatattttatacaatatcataaggctagataatttccataggttatttttaggggaaacctgatacgtaaaattttgcatgaaaagtatagattcgttccttccttccaaatctgctcatcttttactttattttattaaatttatatttgcacatttttgtaaaatgaataaaggaaaaagacactaaagaacatgtctgaacatatcctggaacttcttctttgtaaaatgaataaaggaaaaagacactaaagaacaaagatgatacaccttttgatgaaccactttcacctataaattagtagtaagaatttactcacaaggaagatcttatctacaatgtagctgagaaatgaaactgttgcatatgtaggtaaaactaatcatcttttaggaataagataaagaggtttatgtccactgtttgtctctggcatacatggttttcatgcctagtggctacctaccattcctttcaatcaatttcttaggatataattgacaaatttatgctatgtttataatttttctcttaaatgcctttgtaataagatatactcacacatacacatttaagattctgtctattagtgttattgaaataaatcctagaaacaaaaattaaaagtttaaagcattaaagacaattttgagacaaaatattctatgaaattctatgcaaaattgaattcttctacaagtatgtgatgaagcccacctaccactatttttgtcatcttgaggatgttatatcattatttttacttaactgagctcaaattaaaatctttgtttattctttgttctataaaaaaaaaaaaaaaaaaaa

SEQ ID NO: 359 - protein, 339 aa, Drosophila melanogaster
  Caspase precursor (insect) C14.015
MDATNNGESADQVGIRVGNPEQPNDHTDALGSVGSGGAGSSGLVAGSSHPYGSGAIGQLANGYSSPSSSYRKNVAKMVTDRHAAEYNMRHKNRGMALIFNHEHFEVPTLKSRAGTNVDCENLTRVLKQLDFEVTVYKDCRYKDILRTIEYAASQNHSDSDCILVAILSHGEMGYIYAKDTQYKLDNIWSFFTANHCPSLAGKPKLFFIQACQGDRLDGGVTMQRSQTETDGDSSMSYKIPVHADFLIAYSTVPGFYSWRNTTRGSWFMQSLCAELAANGKRLDILTLLTFVCQRVAVDFESCTPDTPEMHQQKQIPCITTMLTRILRFSDKQLAPAGRV

SEQ ID NO: 360 - DNA, 1020 bp, Drosophila melanogaster
  Caspase precursor (insect)	C14.015
atggacgccactaacaatggagaatccgccgaccaggtgggcatcagggtgggcaatccggagcagcccaacgatcacacagatgccctgggctccgtgggatccggaggagcgggtagcagcggcctggtcgcaggatcctcgcatccttacggcagcggagccattgggcagctggccaacgggtacagctcaccctcgtccagctaccgaaagaatgtagccaaaatggtcaccgaccgccatgcagccgagtacaacatgcgccacaagaaccgcggaatggcactgatcttcaaccatgagcacttcgaggtgcccaccttgaagtcccgcgcgggaaccaatgtggactgcgagaatctgactcgggtgctcaagcagctggacttcgaagtgaccgtgtacaaggactgccgctacaaggacattttgaggacaatcgagtattcagcgtcgcagaatcacagcgatagtgattgcatcctggtcgccatcctgtcgcacggcgagatgggctacatctacgccaaggacacacagtacaagctggataacatctggagcttcttcacggccaatcactgcccctcgctagccggcaaacccaagttgttcttcatacaggcctgccagggcgacagattggatggcggagtgaccatgcagcgttctcagacggaaaccgatggcgactcctcgatgagctacaagattccagtgcacgccgactttctgatcgcctactcgacggttcctggattctattcgtggcgcaacaccacccgcggcacgtggttcatgcagagcctgtgcgccgaactggcggccaatggcaagcggctggacatcctgaccctgctcacattcgtgtgccagcgggtggccgtggactttgagtcctgcaccccggacactccggagatgcaccagcagaagcagataccctgcatcaccaccatgctgacgcgcattctgcgtttcagcgacaagcagttggctccagccggacgggtttga

SEQ ID NO: 361 - protein, 323 aa, Drosophila melanogaster
  Caspase-1 precursor (insect) C14.016
MTDECVTRNYGVGIRSPNGSENRGSFIMADNTDAKGCTPESLVVGGATAASPLPANKFVARMPVERYASEYNMSHKHRGVALIFNHEFFDIPSLKSRTGTNVDAQELKKAFENLGFAVSVHKDCKLRDILKHVGKAAELDHTDNDCLAVAILSHGEHGYLYAKDTQYKLDNIWHYFTATFCPSLAGKPKLFFIQACQGDRLDGGITLEKGVTETDGESSTSYKIPIHADFLFSYSTIPGYFSWRNINNGSWYMQSLIRELNANGKKYDLLTLLTFVNQRVALDFESNVPATPMMDRQKQIPCLTSMLTRILRFGDKPNGNKAG

SEQ ID NO: 362 - DNA, 1757 bp, Drosophila melanogaster
  Caspase-1 precursor (insect)	C14.016
agtttgttttcgccgctcagagcacgcttaacctccgttaattgattgattaaacacgtccgactgtgagccataaaaggacattcgctcgatcgaaagccgacaaaagctggctgagaagcgcaaaacagctgcgctgcgcaaagtttggccaacgcagagcaatagaaaacagaagcagtgtcagaataaaacaagaatcagaccaaaaagggcgcaacaactgcggagagagaaaaggaaggaaagagcagcgcgtgacgagggaggagcaggagggagcgaacaaaaggcaagaggaaacacaaggagaaacgcaaacaatcaaaacaagaacttaagcaagaaaaggggcgcaagatgaccgacgagtgcgtaaccagaaactacggagtaggcattcgcagcccaaatggatcggaaaatcggggcagctttataatggctgataataccgatgccaagggctgtacgccggagtctcttgttgttggtggtgcaactgcagcgagccccttgccggccaacaagtttgtggctcgaatgcccgtggaacgatatgcaagcgaatacaacatgagtcacaagcaccgcggagttgcgctgatcttcaaccacgaattcttcgacataccctcgctgaagagccgcaccggaacaaatgtcgatgcccaagagctgaaaaaggcctttgaaaacctgggattcgcggtgtccgtgcacaaggactgcaagttgagggacatcctgaagcacgtggggaaggccgccgagttggaccacacggacaacgactgccttgcggtggccatactctcgcacggggagcacggctacctgtacgccaaggatacgcagtacaagctggacaacatctggcactacttcactgccaccttctgcccctcgctggcgggcaagccgaagctgttcttcatccaagcctgccagggcgatcgcttggacggaggcatcactctggagaagggcgttaccgagacggacggggagtcctcgacgagctacaagatacccatacacgccgactttctcttctcctactcgaccattccgggctacttctcctggcgcaacatcaacaatggctcctggtacatgcaatcgctgatccgcgagctgaacgccaatggcaaaaagtacgacctgctcaccctgcttacattcgttaaccagcgcgtagccctagactttgagtcgaacgtgcccgccacaccgatgatggatcgccagaagcaaataccgtgcctcacctccatgctgacgcgcatactgcgcttcggcgacaagccgaacggcaataaggctggctaggaagagatctcccttcgaagaagaactttcaacagaggttgtacaaccatcgcccgcaatcattcacgttggattccaattcacttcaagtttagttttagctgacgcgtgcgattaacccgatggatattgaagcacccgactccctttcattcattcccctgcctttcccatgcccatttcggccttatcattgacgaaattcgttacccatttacccactagatgacttccgtatgcataagcgagaccttgccaatagaaaacccacaaatttgagataagataatacaatgaagatttatacatacatacatacttttatgtacacgcaaacatttatatttgatatgaataaaaatgaattaaaaacataaaaaaaaaaaaaaaaaaaaaaaaaaaaacaaaaaaaaaaaaaaaaaaaa

SEQ ID NO: 363 - protein, 377 aa, Bos taurus
  Caspase-13 precursor   C14.017
MAEDKHNKNPLKMLESLGKELISGLLDDFVEKNVLKLEEEEKKKIYDAKLQDKARVLVDSIRQKNQEAGQVFVQTFLNIDKNSTSIKAPEETVAGPDESVGSAATLKLCPHEEFLKLCKERAGEIYPIKERKDRTRLALIICNTEFDHMPPRNGAALDILGMKQLLEGLGYTVEVEEKLTARDMESVLWKFAAREEHKSSDSTFLVFMSHGILDGICGTMHSEEEPDVLPYDTIFRTFNNRNCLSLKDKPKVIIVQACRGANRGELWVSDSPPALADSFSQSSENLEEDAVYKTHVEKDFIAFCSSTPHNVSWRDIKKGSLFITRLITCFQKYAWCCHLEEVFRKVQQSFEKPNVKAQMPTVERLSMTRYFYLFPGN

SEQ ID NO: 364 - DNA, 2060 bp, Homo sapiens
  Caspase-13 precursor	C14.017
ccacgcgtccgcggacgcgtgggctccttcaaggcagtaggaagatactaagcttattatctatggctgaagacaaacacaacaaaaacccacttaagatgttggaatctttgggcaaagaactcatttctggccttttggatgactttgtggaaaaaaatgtcctgaaattggaggaagaggagaagaaaaaaatttatgatgccaaacttcaagacaaagcccgggtcttggttgattctatacgacagaaaaaccaagaggcaggtcaagtctttgttcaaactttcctaaacatagacaaaaattccaccagtataaaagctcctgaggaaactgtggctggaccagatgagtcagtgggatctgcagctaccctcaagctttgccctcatgaagaattcctgaaactgtgtaaagaaagggctggagagatctatccaataaaggagagaaaggaccgcactcgtctggctctcatcatatgcaacacagagtttgatcatatgcctcccaggaatggggctgcccttgacatccttggaatgaagcagctgcttgagggtcttggctacactgtggaagtggaagagaaactcacagccagggacatggaatcagtgctgtggaaatttgctgcacgtgaagagcacaaatcctcagacagtacattcttggtgttcatgtctcatggcatcctggatgggatctgtgggactatgcacagtgaggaagaaccagatgtgttaccttatgataccatcttccggacattcaacaaccgtaattgcctcagtctaaaggacaaacctaaagtcatcattgtccaggcctgcagaggtgcaaatcgtggggaattgtgggtcagtgactctccaccagccttggcagacagcttttcacagtcatccgagaacctggaagaggatgctgtttacaagacccatgtagagaaggacttcattgctttctgttcctcaactccacataatgtgtcctggagagacataaaaaaaggttctctcttcattacacgactcatcacatgcttccaaaaatatgcttggtgctgtcatcttgaggaagtatttaggaaggtacaacaatcatttgaaaaaccaaatgttaaagcccagatgcccactgttgaacgactctctatgacaagatatttctacctctttcctggcaactgaaaataaaaatcacaggaaattcaaccatttatcagcttcaagaagcatttttatcagcacagcatccatgtttaaccttttgtctttcattaaagtgaaaacatatgaactgttctttggggtcctctaagaaagaatagaatttcaattaaaacaatggatggatggaaataaagtagaagaagaaaactggattttcttgttatattgcatataatgcctgcactttactgagtgaagagaactagtcatgacttgccctcagcagcagggtgaaaggagatggtgcacatctggagacaaggaccaaaaactgggtcacctgctcctttgatcactcatcaaaccttgcaactagaattatttggaagaatatttctaatttattatttaaccaacatcataggtcaagttcaattttttttcagaaagttgttatggtacctatgcatctttcttcttatccataaattaatttgctttcttgttgatgatttttcattccagatttccaagcttcaggaaaattttgttatttagcaaacacttggtaattgtctaaaataaattgggcctttgatttaagatggtataattgggtgtgcttgtatagaaagacagacattattagatacagaacatccaagagtgtgggaaatgtcagcaatgggaaagaaaatgttaaattttctggaaagtgaatgtcagtagaggaattttagcaacatggccatctgagccactgactaaggagatgtaccacttcaattacatacatgcagaatgctgaatagatatatcaggacatgctgaactgtattacaaataaaatgattctctagatatcaaaaaaaaaaaaaaaaa

SEQ ID NO: 365 - protein, 242 aa, Homo sapiens
  Caspase-14 precursor   C14.018
MSNPRSLEEEKYDMSGARLALILCVTKAREGSEEDLDALEHMFRQLRFESTMKRDPTAEQFQEELEKFQQAIDSREDPVSCAFVVLMAHGREGFLKGEDGEMVKLENLFEALNNKNCQALRAKPKVYIIQACRGEQRDPGETVGGDEIVMVIKDSPQTIPTYTDALHVYSTVEGYIAYRHDQKGSCFIQTLVDVFTKRKGHILELLTEVTRRMAEAELVQEGKARKTNPEIQSTLRKRLYLQ

SEQ ID NO: 366 - DNA, 777 bp, Homo sapiens
  Caspase-14 precursor	C14.018
aggatcagacaagggtgctgagagccgggactcacaaccaaaggagaaatgagcaatccgcggtctttggaagaggagaaatatgatatgtcaggtgcccgcctggccctaatactgtgtgtcaccaaagcccgggaaggttccgaagaagacctggatgctctggaacacatgtttcggcagctgagattcgaaagcaccatgaaaagagaccccactgccgagcaattccaggaagagctggaaaaattccagcaggccatcgattcccgggaagatcccgtcagttgtgccttcgtggtactcatggctcacgggagggaaggcttcctcaagggagaagatggggagatggtcaagctggagaatctcttcgaggccctgaacaacaagaactgccaggccctgcgagctaagcccaaggtgtacatcatacaggcctgtcgaggagaacaaagggaccccggtgaaacagtaggtggagatgagattgtgatggtcatcaaagacagcccacaaaccatcccaacatacacagatgccttgcacgtttattccacggtagagggatacatcgcctaccgacatgatcagaaaggctcatgctttatccagaccctggtggatgtgttcacgaagaggaaaggacatatcttggaacttctgacagaggtgacccggcggatggcagaagcagagctggttcaagaaggaaaagcaaggaaaacgaaccctgaaatccaaagcaccctccggaaacggctgtatctgcagtag

SEQ ID NO: 367 - protein, 450 aa, Drosophila melanogaster
  Caspase Nc precursor C14.019
MQPPELEIGMPKRHREHIRKNLNILVEWTNYERLAMECVQQGILTVQMLRNTQDLNGKPFNMDEKDVRVEQHRRLLLKITQRGPTAYNLLINALRNINCLDAAVLLESVDESDSRPPFISLNERRTSRKSADIVDTPSPEASEGPCVSKLRNEPLGALTPYVGVVDGPEVKKSKKIHGGDSAILGTYKMQSRFNRGVLLMVNIMDYPDQNRRRIGAEKDSKSLIHLFQELNFTIFPYGNVNQDQFFKLLTMVTSSSYVQNTECFVMVLMTHGNSVEGKEKVEFCDGSVVDMQKIKDHFQTAKCPYLVNKPKVLMFPFCRGDEYDLGHPKNQGNLMEPVYTAQEEKWPDTQTEGIPSPSTNVPSLADTLVCYANTPGYVTHRDLDTGSWYIQKFCQVMADHAHDTDLEDILKKTSEAVGNKRTKKGSMQTGAYDNLGFNKKLYFNPGFFNE

SEQ ID NO: 368 - DNA, 2090 bp, Drosophila melanogaster
  Caspase Nc precursor	C14.019
tttggcggcgcgaaacgctcgttggtccttttgtttcgaaagaaatcctattcgaagatccccgatccttgctaggatcatctagtgcaatatatagactagttaatttacttttggaaaaataaggacaccagcagggccgccgatttgtgcccctttcttgaaagtcgcaaaacaaaaacaacgacgacaacaacaaagcggagacaaagaatcgacaagtagcgataaacgaaatcattcccgggaaaaccttggagacgggtgattcactgccaataccactgccaattggagactgatcacggcagccatccttggcgcgcccaataagcggagtcaccggaacgcgtggaagccatatccggaatgcagccgccggagctcgagattggaatgccgaagaggcatcgcgagcatatacgcaagaatctgaatatactggttgaatggacgaactacgagcgtctggccatggagtgcgtgcaacagggcatcctaaccgttcagatgctaagaaatacgcaggatctcaatggcaagccattcaacatggacgagaaggatgtgcgtgtggagcagcatcgtaggctcctattgaagatcacccagcgtggtcccaccgcctataacctgctgatcaatgcactgcgcaatatcaattgtctggatgcggccgttctattggaatccgtcgatgagtccgattcaaggccaccctttatctcgctaaacgaacggagaaccagccggaagtcggccgatattgtggacacaccctcacccgaagcctccgaaggaccctgcgttagcaagctccggaatgagccgctgggagcactcaccccttatgtgggtgtcgttgacggtcccgaggtaaaaaaatcgaaaaagatacatggtggggatagtgccatattgggcacatataagatgcaatcacgtttcaaccgaggcgttttgctaatggttaacataatggactatccggatcaaaaccgtcgacggatcggagccgaaaaggacagcaagtcgttgatacacttgtttcaagaactgaattttacgattttcccctatgggaacgtgaatcaggatcagttctttaaacttctgacaatggtgacctcctcgtcgtatgtgcagaataccgagtgtttcgtaatggtactgatgacacacggcaacagtgtggagggaaaagagaaggtggagttttgcgatggatctgtggtcgatatgcagaagatcaaggaccatttccagacggccaaatgtccttatttggtgaacaagccgaaggtgcttatgtttcccttttgccgcggcgatgaatatgatttgggccatccaaagaatcaaggcaatctcatggagccagtgtatacggcgcaagaggagaagtggcctgacacccagacggagggcatacccagcccgagcaccaatgtgccaagtcttgccgacactctggtctgctatgctaatacgccgggctatgttacccaccgcgatctcgacacgggcagctggtacatccagaagttttgccaagtgatggccgatcatgcccacgacacagaccttgaggatatcctaaagaagacgagcgaagccgtgggtaataagcgcaccaagaagggttccatgcagacaggtgcctatgataatcttggctttaataagaaactctacttcaatcccgggtttttcaacgaatagttgccgccactggacattttatcattccggatgcatttttaaccgcatttatgttcttatcgtcgcatttagtatgtcttttagattatgtgttctgtgctcgcgtgctataaaatgtttatattgtaacaaatactcattcaagtattcttctaatacgtattgcatacctcatttaaaggtacgaaattatgtaatttatgtgataactgccagaaatctacaaatattataatacagagttccagtatatacacagccagatttttgaaatcgaacatttaggcaaaatgtaaagcaattttccagtctgatttttgagtgtgtacacttacaaaataaacgatgatatttcacaaggcccaaag

SEQ ID NO: 369 - protein, 824 aa, Homo sapiens
  MALT lymphoma translocation protein 1 (paracaspase) C14.026
MSLLGDPLQALPPSAAPTGPLLAPPAGATLNRLREPLLRRLSELLDQAPEGRGWRRLAELAGSRGRLRLSCLDLEQCSLKVLEPEGSPSLCLLKLMGEKGCTVTELSDFLQAMEHTEVLQLLSPPGIKITVNPESKAVLAGQFVKLCCRATGHPFVQYQWFKMNKEIPNGNTSELIFNAVHVKDAGFYVCRVNNNFTFEFSQWSQLDVCDIPESFQRSVDGVSESKLQICVEPTSQKLMPGSTLVLQCVAVGSPIPHYQWFKNELPLTHETKKLYMVPYVDLEHQGTYWCHVYNDRDSQDSKKVEIIIGRTDEAVECTEDELNNLGHPDNKEQTTDQPLAKDKVALLIGNMNYREHPKLKAPLVDVYELTNLLRQLDFKVVSLLDLTEYEMRNAVDEFLLLLDKGVYGLLYYAGHGYENFGNSFMVPVDAPNPYRSENCLCVQNILKLMQEKETGLNVFLLDMCRKRNDYDDTIPILDALKVTANIVFGYATCQGAEAFEIQHSGLANGIFMKFLKDRLLEDKKITVLLDEVAEDMGKCHLTKGKQALEIRSSLSEKRALTDPIQGTEYSAESLVRNLQWAKAHELPESMCLKFDCGVQIQLGFAAEFSNVMIIYTSIVYKPPEIIMCDAYVTDFPLDLDIDPKDANKGTPEETGSYLVSKDLPKHCLYTRLSSLQKLKEHLVFTVCLSYQYSGLEDTVEDKQEVNVGKPLIAKLDMHRGLGRKTCFQTCLMSNGPYQSSAATSGGAGHYHSLQDPFHGVYHSHPGNPSNVTPADSCHCSRTPDAFISSFAHHASCHFSRSNVPVETTDEIPFSFSDRLRISEK

SEQ ID NO: 370 - DNA, 2828 bp, Homo sapiens
  MALT lymphoma translocation protein 1 (paracaspase)	C14.026
ggggcggggagcggacttcctcctctgagggccgtgccgcgctgccagatttgttcttccgcccctgcctccgcggctcggaggcgagcggaaggtgccccggggccgaggcccgtgacggggcgggcgggagccccggcagtccggggtcgccggcgagggccatgtcgctgttgggggacccgctacaggccctgccgccctcggccgcccccacggggccgctgctcgcccctccggccggcgcgaccctcaaccgcctgcgggagccgctgctgcggaggctcagcgagctcctggatcaggcgcccgagggccggggctggaggagactggcggagctggcggggagtcgcgggcgcctccgcctcagttgcctagacctggagcagtgttctcttaaggtactggagcctgaaggaagccccagcctgtgtctgctgaagttaatgggtgaaaaaggttgcacagtcacagaattgagtgatttcctgcaggctatggaacacactgaagttcttcagcttctcagccccccaggaataaagattactgtaaacccagagtcaaaggcagtcttggctggacagtttgtgaaactgtgttgccgggcaactggacatccttttgttcaatatcagtggttcaaaatgaataaagagattccaaatggaaatacatcagagcttatttttaatgcagtgcatgtaaaagatgcaggcttttatgtctgtcgagttaataacaatttcacctttgaattcagccagtggtcacagctggatgtttgcgacatcccagagagcttccagagaagtgttgatggcgtctctgaatccaagttgcaaatctgtgttgaaccaacttcccaaaagctgatgccaggcagcacattggttttacagtgtgttgctgttggaagccctattcctcactaccagtggttcaaaaatgaattaccattaacacatgagaccaaaaagctatacatggtgccttatgtggatttggaacaccaaggaacctactggtgtcatgtatataatgatcgagacagtcaagatagcaagaaggtagaaatcatcataggaagaacagatgaggcagtggagtgcactgaagatgaattaaataatcttggtcatcctgataataaagagcaaacaactgaccagcctttggcgaaggacaaggttgcccttttgataggaaatatgaattaccgggagcaccccaagctcaaagctcctttggtggatgtgtacgaattgactaacttactgagacagctggacttcaaagtggtttcactgttggatcttactgaatatgagatgcgtaatgctgtggatgagtttttactccttttagacaagggagtatatgggttattatattatgcaggacatggttatgaaaattttgggaacagcttcatggtccccgttgatgctccaaatccatataggtctgaaaattgtctgtgtgtacaaaatatactgaaattgatgcaagaaaaagaaactggacttaatgtgttcttattggatatgtgtaggaaaagaaatgactacgatgataccattccaatcttggatgcactaaaagtcaccgccaatattgtgtttggatatgccacgtgtcaaggagcagaagcttttgaaatccagcattctggattggcaaatggaatctttatgaaatttttaaaagacagattattagaagataagaaaatcactgtgttactggatgaagttgcagaagatatgggtaagtgtcaccttaccaaaggcaaacaggctctagagattcgaagtagtttatctgagaagagagcacttactgatccaatacagggaacagaatattctgctgaatctcttgtgcggaatctacagtgggccaaggctcatgaacttccagaaagtatgtgtcttaagtttgactgtggtgttcagattcaattaggatttgcagctgagttttccaatgtcatgatcatctatacaagtatagtttacaaaccaccggagataataatgtgtgatgcctacgttactgattttccacttgatctagatattgatccaaaagatgcaaataaaggcacacctgaagaaactggcagctacttggtatcaaaggatcttcccaagcattgcctctataccagactcagttcactgcaaaaattaaaggaacatctagtcttcacagtatgtttatcatatcagtactcaggattggaagatactgtagaggacaagcaggaagtgaatgttgggaaacctctcattgctaaattagacatgcatcgaggtttgggaaggaagacttgctttcaaacttgtcttatgtctaatggtccttaccagagttctgcagccacctcaggaggagcagggcattatcactcattgcaagacccattccatggtgtttaccattcacatcctggtaatccaagtaatgttacaccagcagatagctgtcattgcagccggactccagatgcatttatttcaagtttcgctcaccatgcttcatgtcattttagtagaagtaatgtgccagtagagacaactgatgaaataccatttagtttctctgacaggctcagaatttctgaaaaatgacctccttgtttttgaaagttagcataattttagatgcctgtgaaatagtactgcacttacataaagtgagacattgtgaaaaggcaaatttgtatatgtagagaaagaatagtagtaactgtttcatagcaaacttcaggactttgagatgttgaaattacattatttaattacagacttcctctttct

SEQ ID NO: 371 - protein, 480 aa, Homo sapiens
  CASP8 and FADD-like apoptosis regulator precursor (c-FLIP) C14.971
MSAEVIHQVEEALDTDEKEMLLFLCRDVAIDVVPPNVRDLLDILRERGKLSVGDLAELLYRVRRFDLLKRILKMDRKAVETHLLRNPHLVSDYRVLMAEIGEDLDKSDVSSLIFLMKDYMGRGKISKEKSFLDLVVELEKLNLVAPDQLDLLEKCLKNIHRIDLKTKIQKYKQSVQGAGTSYRNVLQAAIQKSLKDPSNNFRLHNGRSKEQRLKEQLGAQQEPVKKSIQESEAFLPQSIPEERYKMKSKPLGICLIIDCIGNETELLRDTFTSLGYEVQKFLHLSMHGISQILGQFACMPEHRDYDSFVCVLVSRGGSQSVYGVDQTHSGLPLHHIRRMFMGDSCPYLAGKPKMFFIQNYVVSEGQLEDSSLLEVDGPAMKNVEFKAQKRGLCTVHREADFFWSLCTADMSLLEQSHSSPSLYLQCLSQKLRQERKRPLLDLHIELNGYMYDWNSRVSAKEKYYVWLQHTLRKKLILSYT

SEQ ID NO: 372 - DNA, 1443 bp, Homo sapiens
  CASP8 and FADD-like apoptosis regulator precursor (c-FLIP)	C14.971
atgtctgctgaagtcatccatcaggttgaagaagcacttgatacagatgagaaggagatgctgctctttttgtgccgggatgttgctatagatgtggttccacctaatgtcagggaccttctggatattttacgggaaagaggtaagctgtctgtcggggacttggctgaactgctctacagagtgaggcgatttgacctgctcaaacgtatcttgaagatggacagaaaagctgtggagacccacctgctcaggaaccctcaccttgtttcggactatagagtgctgatggcagagattggtgaggatttggataaatctgatgtgtcctcattaattttcctcatgaaggattacatgggccgaggcaagataagcaaggagaagagtttcttggaccttgtggttgagttggagaaactaaatctggttgccccagatcaactggatttattagaaaaatgcctaaagaacatccacagaatagacctgaagacaaaaatccagaagtacaagcagtctgttcaaggagcagggacaagttacaggaatgttctccaagcagcaatccaaaagagtctcaaggatccttcaaataacttcaggctccataatgggagaagtaaagaacaaagacttaaggaacagcttggcgctcaacaagaaccagtgaagaaatccattcaggaatcagaagcttttttgcctcagagcatacctgaagagagatacaagatgaagagcaagcccctaggaatctgcctgataatcgattgcattggcaatgagacagagcttcttcgagacaccttcacttccctgggctatgaagtccagaaattcttgcatctcagtatgcatggtatatcccagattcttggccaatttgcctgtatgcccgagcaccgagactacgacagctttgtgtgtgtcctggtgagccgaggaggctcccagagtgtgtatggtgtggatcagactcactcagggctccccctgcatcacatcaggaggatgttcatgggagattcatgcccttatctagcagggaagccaaagatgttttttattcagaactatgtggtgtcagagggccagctggaggacagcagcctcttggaggtggatgggccagcgatgaagaatgtggaattcaaggctcagaagcgagggctgtgcacagttcaccgagaagctgacttcttctggagcctgtgtactgcggacatgtccctgctggagcagtctcacagctcaccatccctgtacctgcagtgcctctcccagaaactgagacaagaaagaaaacgcccactcctggatcttcacattgaactcaatggctacatgtatgattggaacagcagagtttctgccaaggagaaatattatgtctggctgcagcacactctgagaaagaaacttatcctctcctacacataa

SEQ ID NO: 373 - DNA, 4874 bp, Artificial Sequence
  pCMV4
cccattcgccattcaggctgcgcaactgttgggaagggcgatcggtgcgggcctcttcgctattacgccagctggcgaaagggggatgtgctgcaaggcgattaagttgggtaacgccagggttttcccagtcacgacgttgtaaaacgacggccagtgccaagctgatctatacattgaatcaatattggcaattagccatattagtcattggttatatagcataaatcaatattggctattggccattgcatacgttgtatctatatcataatatgtacatttatattggctcatgtccaatatgaccgccatgttgacattgattattgactagttattaatagtaatcaattacggggtcattagttcatagcccatatatggagttccgcgttacataacttacggtaaatggcccgcctggctgaccgcccaacgacccccgcccattgacgtcaataatgacgtatgttcccatagtaacgccaatagggactttccattgacgtcaatgggtggagtatttacggtaaactgcccacttggcagtacatcaagtgtatcatatgccaagtccgccccctattgacgtcaatgacggtaaatggcccgcctggcattatgcccagtacatgaccttacgggactttcctacttggcagtacatctacgtattagtcatcgctattaccatggtgatgcggttttggcagtacaccaatgggcgtggatagcggtttgactcacggggatttccaagtctccaccccattgacgtcaatgggagtttgttttggcaccaaaatcaacgggactttccaaaatgtcgtaataaccccgccccgttgacgcaaatgggcggtaggcgtgtacggtgggaggtctatataagcagagctcgtttagtgaaccgtcagaattgtttttatttttaattttctttcaaatacttccatcgaattcagatctggtaccacgcgtatcgataagcttgcatgcctgcaggtcgactctagaggatccccgggtggcatccctgtgacccctccccagtgcctctcctggccttggaagttgccactccagtgcccaccagccttgtcctaataaaattaagttgcatcattttgtctgactaggtgtcctctataatattatggggtggaggggggtggtatggagcaaggggcccaagttgggaagacaacctgtagggcctgcggggtctattcgggaaccaagctggagtgcagtggcacaatcttggctcactgcaatctccgcctcctgggttcaagcgattctcctgcctcagcctcccgagttgttgggattccaggcatgcatgaccaggctcagctaatttttgtttttttggtagagacggggtttcaccatattggccaggctggtctccaactcctaatctcaggtgatctacccaccttggcctcccaaattgctgggattacaggcgtgaaccactgctcccttccctgtccttctgattttaaaataactataccagcaggaggacgtccagacacagcataggctacctgccatggcccaaccggtgggacatttgagttgcttgcttggcactgtcctctcatgcgttgggtccactcagtagatgcctgttgaattgggtacgcggccagcttctgtggaatgtgtgtcagttagggtgtggaaagtccccaggctccccagcaggcagaagtatgcaaagcatgcatctcaattagtcagcaaccaggtgtggaaaagtccccaggctccccagcaggcagaagtatgcaaagcatgcatctcaattagtcagcaaccatagtcccgcccctaactccgcccatcccgcccctaactccgcccagttccgcccattctccgccccatggctgactaattttttttatttatgcagaggccgaggccgcctcggcctctgagctattccagaagtagtgaggaggcttttttggaggcctaggcttttgcaaaaagctcctcgaggaactgaaaaaccagaaagttaactggtaagtttagtctttttgtcttttatttcaggtcccggatccggtggtggtgcaaatcaaagaactgctcctcagtggatgttgcctttacttctaggcctgtacggaagtgttacttctgctctaaaagctgctgcaggtcgactctagggccgcgtaccgagctcgaattccctatagtgagtcgtattaaattcgtaatcatggtcatagctgtttcctgtgtgaaattgttatccgctcacaattccacacaacatacgagccggaagcataaagtgtaaagcctggggtgcctaatgagtgagctaactcacattaattgcgttgcgctcactgcccgctttccagtcgggaaacctgtcgtgccagctgcattaatgaatcggccaacgcgcggggagaggcggtttgcgtattgggcgctcttccgcttcctcgctcactgactcgctgcgctcggtcgttcggctgcggcgagcggtatcagctcactcaaaggcggtaatacggttatccacagaatcaggggataacgcaggaaagaacatgtgagcaaaaggccagcaaaaggccaggaaccgtaaaaggccgcgttgctggcgtttttccataggctccgcccccctgacgagcatcacaaaaatcgacgctcaagtcagaggtggcgaaacccgacaggactataaagataccaggcgtttccccctggaagctccctcgtgcgctctcctgttccgaccctgccgcttaccggatacctgtccgcctttctcccttcgggaagcgtggcgctttctcaatgctcacgctgtaggtatctcagttcggtgtaggtcgttcgctccaagctgggctgtgtgcacgaaccccccgttcagcccgaccgctgcgccttatccggtaactatcgtcttgagtccaacccggtaagacacgacttatcgccactggcagcagccactggtaacaggattagcagagcgaggtatgtaggcggtgctacagagttcttgaagtggtggcctaactacggctacactagaaggacagtatttggtatctgcgctctgctgaagccagttaccttcggaaaaagagttggtagctcttgatccggcaaacaaaccaccgctggtagcggtggtttttttgtttgcaagcagcagattacgcgcagaaaaaaaggatctcaagaagatcctttgatcttttctacggggtctgacgctcagtggaacgaaaactcacgttaagggattttggtcatgagattatcaaaaaggatcttcacctagatccttttaaattaaaaatgaagttttaaatcaatctaaagtatatatgagtaaacttggtctgacagttaccaatgcttaatcagtgaggcacctatctcagcgatctgtctatttcgttcatccatagttgcctgactccccgtcgtgtagataactacgatacgggagggcttaccatctggccccagtgctgcaatgataccgcgagacccacgctcaccggctccagatttatcagcaataaaccagccagccggaagggccgagcgcagaagtggtcctgcaactttatccgcctccatccagtctattaattgttgccgggaagctagagtaagtagttcgccagttaatagtttgcgcaacgttgttgccattgctacaggcatcgtggtgtcacgctcgtcgtttggtatggcttcattcagctccggttcccaacgatcaaggcgagttacatgatcccccatgttgtgcaaaaaagcggttagctccttcggtcctccgatcgttgtcagaagtaagttggccgcagtgttatcactcatggttatggcagcactgcataattctcttactgtcatgccatccgtaagatgcttttctgtgactggtgagtactcaaccaagtcattctgagaatagtgtatgcggcgaccgagttgctcttgcccggcgtcaatacgggataataccgcgccacatagcagaactttaaaagtgctcatcattggaaaacgttcttcggggcgaaaactctcaaggatcttaccgctgttgagatccagttcgatgtaacccactcgtgcacccaactgatcttcagcatcttttactttcaccagcgtttctgggtgagcaaaaacaggaaggcaaaatgccgcaaaaaagggaataagggcgacacggaaatgttgaatactcatactcttcctttttcaatattattgaagcatttatcagggttattgtctcatgagcggatacatatttgaatgtatttagaaaaataaacaaataggggttccgcgcacatttccccgaaaagtgccacctgacgcgccctgtagcggcgcattaagcgcggcgggtgtggtggttacgcgcagcgtgaccgctacacttgccagcgccctagcgcccgctcctttcgctttcttcccttcctttctcgccacgttcgccggctttccccgtcaagctctaaatcggggcatccctttagggttccgatttagtgctttacggcacctcgaccccaaaaaacttgattagggtgatggttcacgtagtgggccatcgccctgatagacggtttttcgccctttgacgttggagtccacgttctttaatagtggactcttgttccaaactggaacaacactcaaccctatctcggtctattcttttgatttataagggattttgccgatttcggcctattggttaaaaaatgagctgatttaacaaaaatttaacgcgaattttaacaaaatattaacaaaatattaacgtttacaatttc

SEQ ID NO: 374 - DNA, 35 bp, Artificial Sequence
  primer 496
acgtggcccaggcggcctttcagtgtggccaaaag

SEQ ID NO: 375 - DNA, 32 bp, Artificial Sequence
  primer 497
tcctggccggcctggccgagcaggccattctc

SEQ ID NO: 376 - DNA, 4681 bp, Artificial Sequence
  pComb3H phagemid vector
gggaaattgtaagcgttaatattttgttaaaattcgcgttaaatttttgttaaatcagctcattttttaaccaataggccgaaatcggcaaaatcccttataaatcaaaagaatagaccgagatagggttgagtgttgttccagtttggaacaagagtccactattaaagaacgtggactccaacgtcaaagggcgaaaaaccgtctatcagggcgatggcccactacgtgaaccatcaccctaatcaagttttttggggtcgaggtgccgtaaagcactaaatcggaaccctaaagggagcccccgatttagagcttgacggggaaagccggcgaacgtggcgagaaaggaagggaagaaagcgaaaggagcgggcgctagggcgctggcaagtgtagcggtcacgctgcgcgtaaccaccacacccgccgcgcttaatgcgccgctacagggcgcgtcaggtggcacttttcggggaaatgtgcgcggaacccctatttgtttatttttctaaatacattcaaatatgtatccgctcatgagacaataaccctgataaatgcttcaataatattgaaaaaggaagagtatgagtattcaacatttccgtgtcgcccttattcccttttttgcggcattttgccttcctgtttttgctcacccagaaacgctggtgaaagtaaaagatgctgaagatcagttgggtgcacgagtgggttacatcgaactggatctcaacagcggtaagatccttgagagttttcgccccgaagaacgttttccaatgatgagcacttttaaagttctgctatgtggcgcggtattatcccgtattgacgccgggcaagagcaactcggtcgccgcatacactattctcagaatgacttggttgagtactcaccagtcacagaaaagcatcttacggatggcatgacagtaagagaattatgcagtgctgccataaccatgagtgataacactgcggccaacttacttctgacaacgatcggaggaccgaaggagctaaccgcttttttgcacaacatgggggatcatgtaactcgccttgatcgttgggaaccggagctgaatgaagccataccaaacgacgagcgtgacaccacgatgcctgtagcaatggcaacaacgttgcgcaaactattaactggcgaactacttactctagcttcccggcaacaattaatagactggatggaggcggataaagttgcaggaccacttctgcgctcggcccttccggctggctggtttattgctgataaatctggagccggtgagcgtgggtctcgcggtatcattgcagcactggggccagatggtaagccctcccgtatcgtagttatctacacgacggggagtcaggcaactatggatgaacgaaatagacagatcgctgagataggtgcctcactgattaagcattggtaactgtcagaccaagtttactcatatatactttagattgatttaaaacttcatttttaatttaaaaggatctaggtgaagatcctttttgataatctcatgaccaaaatcccttaacgtgagttttcgttccactgagcgtcagaccccgtagaaaagatcaaaggatcttcttgagatcctttttttctgcgcgtaatctgctgcttgcaaacaaaaaaaccaccgctaccagcggtggtttgtttgccggatcaagagctaccaactctttttccgaaggtaactggcttcagcagagcgcagataccaaatactgtccttctagtgtagccgtagttaggccaccacttcaagaactctgtagcaccgcctacatacctcgctctgctaatcctgttaccagtggctgctgccagtggcgataagtcgtgtcttaccgggttggactcaagacgatagttaccggataaggcgcagcggtcgggctgaacggggggttcgtgcacacagcccagcttggagcgaacgacctacaccgaactgagatacctacagcgtgagctatgagaaagcgccacgcttcccgaagggagaaaggcggacaggtatccggtaagcggcagggtcggaacaggagagcgcacgagggagcttccagggggaaacgcctggtatctttatagtcctgtcgggtttcgccacctctgacttgagcgtcgatttttgtgatgctcgtcaggggggcggagcctatggaaaaacgccagcaacgcggcctttttacggttcctggccttttgctggccttttgctcacatgttctttcctgcgttatcccctgattctgtggataaccgtattaccgcctttgagtgagctgataccgctcgccgcagccgaacgaccgagcgcagcgagtcagtgagcgaggaagcggaagagcgcccaatacgcaaaccgcctctccccgcgcgttggccgattcattaatgcagctggcacgacaggtttcccgactggaaagcgggcagtgagcgcaacgcaattaatgtgagttagctcactcattaggcaccccaggctttacactttatgcttccggctcgtatgttgtgtggaattgtgagcggataacaattgaattcaggaggaatttaaaatgaaaaagacagctatcgcgattgcagtggcactggctggtttcgctaccgtggcccaggcggccgagctcgtgttgacccaatctccagcttctttggctgtgtctctagggcagagggccaccatctcctgcagagccagcgaaagtgttgataattatggcattagttttatgaactggttccaacagaaaccaggacagccacccaaactcctcatctatgctgcatccaacctaggatccggggtccctgccaggtttagtggcagtgggtctgggacagacttcagtctcaacatccatcctatggaggaggaagatactgcaatgtatttctgtcagcaaagtaaggaggttccgctcacgttcggtgctgggaccaaggtggagctgaaacgggctgatgctgcaccaactgtatccatcttcccaccatccagtgagcagttaacatctggaggtgcctcagtcgtgtgcttcttgaacaacttctaccccaaagacatcaatgtcaagtggaagattgatggcagtgaacgacaaaatggcgtcctgaacagttggactgatcaggacagcaaagacagcacctacagcatgagcagcaccctcacgttgaccaaggacgagtatgaacgacataacagctatacctgtgaggccactcacaagacatcaacttcacccattgtcaagagcttcaacatgaatcaccactaatctagataattaattaggaggaatttaaaatgaaatacctattgcctacggcagccgctggattgttattactcgctgcccaaccagccatggccgaggtgcagctgctcgagcagcctgggtctgtgctggtaaggcctggagcttcagtgaagctgtcctgcaaggcttctggctacaccttcaccagctcctggatacactgggcgaagcagaggcctggacaaggccttgagtggattggagagattcatcctaatagtggtaatactaactacaatgagaagttcaagggcaaggccacactgactgtagacacatcctccagcacagcctacgtggatctcagcagcctgacatctgaggactctgcggtctattactgtgcaagatggaggtacggtagtccctactactttgactactggggccaaggcaccactctcactgtctcctcagccaaaacgacacccccatctgtctatccactggcccctggatctgctgcccaaactaactccatggtgaccctgggatgcctggtcaagggctatttccctgagccagtgacagtgacctggaactctggatccctgtccagcggtgtgcacaccttcccagctgtcctgcagtctgacctctacactctgagcagctcagtgactgtcccctccagcacctggcccagcgagaccgtcacctgcaacgttgcccacccggccagcagcaccaaggtggacaagaaaattgtgccccatcatactagtggccaggccggccaggagggtggtggctctgagggtggcggttctgagggtggcggctctgagggaggcggttccggtggtggctctggttccggtgattttgattatgaaaagatggcaaacgctaataagggggctatgaccgaaaatgccgatgaaaacgcgctacagtctgacgctaaaggcaaacttgattctgtcgctactgattacggtgctgctatcgatggtttcattggtgacgtttccggccttgctaatggtaatggtgctactggtgattttgctggctctaattcccaaatggctcaagtcggtgacggtgataattcacctttaatgaataatttccgtcaatatttaccttccctccctcaatcggttgaatgtcgcccttttgtctttagcgctggtaaaccatatgaattttctattgattgtgacaaaataaacttattccgtggtgtctttgcgtttcttttatatgttgccacctttatgtatgtattttctacgtttgctaacatactgcgtaataaggagtcttaagctagctaattaatttaagcggccgcagatct

SEQ ID NO: 377 - DNA, 4361 bp, Artificial Sequence
  PBR322
ttctcatgtttgacagcttatcatcgataagctttaatgcggtagtttatcacagttaaattgctaacgcagtcaggcaccgtgtatgaaatctaacaatgcgctcatcgtcatcctcggcaccgtcaccctggatgctgtaggcataggcttggttatgccggtactgccgggcctcttgcgggatatcgtccattccgacagcatcgccagtcactatggcgtgctgctagcgctatatgcgttgatgcaatttctatgcgcacccgttctcggagcactgtccgaccgctttggccgccgcccagtcctgctcgcttcgctacttggagccactatcgactacgcgatcatggcgaccacacccgtcctgtggatcctctacgccggacgcatcgtggccggcatcaccggcgccacaggtgcggttgctggcgcctatatcgccgacatcaccgatggggaagatcgggctcgccacttcgggctcatgagcgcttgtttcggcgtgggtatggtggcaggccccgtggccgggggactgttgggcgccatctccttgcatgcaccattccttgcggcggcggtgctcaacggcctcaacctactactgggctgcttcctaatgcaggagtcgcataagggagagcgtcgaccgatgcccttgagagccttcaacccagtcagctccttccggtgggcgcggggcatgactatcgtcgccgcacttatgactgtcttctttatcatgcaactcgtaggacaggtgccggcagcgctctgggtcattttcggcgaggaccgctttcgctggagcgcgacgatgatcggcctgtcgcttgcggtattcggaatcttgcacgccctcgctcaagccttcgtcactggtcccgccaccaaacgtttcggcgagaagcaggccattatcgccggcatggcggccgacgcgctgggctacgtcttgctggcgttcgcgacgcgaggctggatggccttccccattatgattcttctcgcttccggcggcatcgggatgcccgcgttgcaggccatgctgtccaggcaggtagatgacgaccatcagggacagcttcaaggatcgctcgcggctcttaccagcctaacttcgatcactggaccgctgatcgtcacggcgatttatgccgcctcggcgagcacatggaacgggttggcatggattgtaggcgccgccctataccttgtctgcctccccgcgttgcgtcgcggtgcatggagccgggccacctcgacctgaatggaagccggcggcacctcgctaacggattcaccactccaagaattggagccaatcaattcttgcggagaactgtgaatgcgcaaaccaacccttggcagaacatatccatcgcgtccgccatctccagcagccgcacgcggcgcatctcgggcagcgttgggtcctggccacgggtgcgcatgatcgtgctcctgtcgttgaggacccggctaggctggcggggttgccttactggttagcagaatgaatcaccgatacgcgagcgaacgtgaagcgactgctgctgcaaaacgtctgcgacctgagcaacaacatgaatggtcttcggtttccgtgtttcgtaaagtctggaaacgcggaagtcagcgccctgcaccattatgttccggatctgcatcgcaggatgctgctggctaccctgtggaacacctacatctgtattaacgaagcgctggcattgaccctgagtgatttttctctggtcccgccgcatccataccgccagttgtttaccctcacaacgttccagtaaccgggcatgttcatcatcagtaacccgtatcgtgagcatcctctctcgtttcatcggtatcattacccccatgaacagaaatcccccttacacggaggcatcagtgaccaaacaggaaaaaaccgcccttaacatggcccgctttatcagaagccagacattaacgcttctggagaaactcaacgagctggacgcggatgaacaggcagacatctgtgaatcgcttcacgaccacgctgatgagctttaccgcagctgcctcgcgcgtttcggtgatgacggtgaaaacctctgacacatgcagctcccggagacggtcacagcttgtctgtaagcggatgccgggagcagacaagcccgtcagggcgcgtcagcgggtgttggcgggtgtcggggcgcagccatgacccagtcacgtagcgatagcggagtgtatactggcttaactatgcggcatcagagcagattgtactgagagtgcaccatatgcggtgtgaaataccgcacagatgcgtaaggagaaaataccgcatcaggcgctcttccgcttcctcgctcactgactcgctgcgctcggtcgttcggctgcggcgagcggtatcagctcactcaaaggcggtaatacggttatccacagaatcaggggataacgcaggaaagaacatgtgagcaaaaggccagcaaaaggccaggaaccgtaaaaaggccgcgttgctggcgtttttccataggctccgcccccctgacgagcatcacaaaaatcgacgctcaagtcagaggtggcgaaacccgacaggactataaagataccaggcgtttccccctggaagctccctcgtgcgctctcctgttccgaccctgccgcttaccggatacctgtccgcctttctcccttcgggaagcgtggcgctttctcatagctcacgctgtaggtatctcagttcggtgtaggtcgttcgctccaagctgggctgtgtgcacgaaccccccgttcagcccgaccgctgcgccttatccggtaactatcgtcttgagtccaacccggtaagacacgacttatcgccactggcagcagccactggtaacaggattagcagagcgaggtatgtaggcggtgctacagagttcttgaagtggtggcctaactacggctacactagaaggacagtatttggtatctgcgctctgctgaagccagttaccttcggaaaaagagttggtagctcttgatccggcaaacaaaccaccgctggtagcggtggtttttttgtttgcaagcagcagattacgcgcagaaaaaaaggatctcaagaagatcctttgatcttttctacggggtctgacgctcagtggaacgaaaactcacgttaagggattttggtcatgagattatcaaaaaggatcttcacctagatccttttaaattaaaaatgaagttttaaatcaatctaaagtatatatgagtaaacttggtctgacagttaccaatgcttaatcagtgaggcacctatctcagcgatctgtctatttcgttcatccatagttgcctgactccccgtcgtgtagataactacgatacgggagggcttaccatctggccccagtgctgcaatgataccgcgagacccacgctcaccggctccagatttatcagcaataaaccagccagccggaagggccgagcgcagaagtggtcctgcaactttatccgcctccatccagtctattaattgttgccgggaagctagagtaagtagttcgccagttaatagtttgcgcaacgttgttgccattgctgcaggcatcgtggtgtcacgctcgtcgtttggtatggcttcattcagctccggttcccaacgatcaaggcgagttacatgatcccccatgttgtgcaaaaaagcggttagctccttcggtcctccgatcgttgtcagaagtaagttggccgcagtgttatcactcatggttatggcagcactgcataattctcttactgtcatgccatccgtaagatgcttttctgtgactggtgagtactcaaccaagtcattctgagaatagtgtatgcggcgaccgagttgctcttgcccggcgtcaacacgggataataccgcgccacatagcagaactttaaaagtgctcatcattggaaaacgttcttcggggcgaaaactctcaaggatcttaccgctgttgagatccagttcgatgtaacccactcgtgcacccaactgatcttcagcatcttttactttcaccagcgtttctgggtgagcaaaaacaggaaggcaaaatgccgcaaaaaagggaataagggcgacacggaaatgttgaatactcatactcttcctttttcaatattattgaagcatttatcagggttattgtctcatgagcggatacatatttgaatgtatttagaaaaataaacaaataggggttccgcgcacatttccccgaaaagtgccacctgacgtctaagaaaccattattatcatgacattaacctataaaaataggcgtatcacgaggccctttcgtcttcaagaa

SEQ ID NO: 378 - protein, 5 aa, Artificial Sequence
  wildtype RCL sequence from P4-P1
VSARM

SEQ ID NO: 379 - protein, 5 aa, Artificial Sequence
  mutant RCL sequence from P4-P1'
RRARM

SEQ ID NO: 380 - DNA, 44 bp, Artificial Sequence
  RRARM mutagenic primer
ccacagctgtcataaggagggccagaatggcccccgaggagatc

SEQ ID NO: 381 - DNA, 18 bp, Artificial Sequence
  primer 535
cagctatcgcgattgcag

SEQ ID NO: 382 - DNA, 17 bp, Artificial Sequence
  primer 5542
gtgcgcagccatcccgg

SEQ ID NO: 383 - DNA, 19 bp, Artificial Sequence
  variation 8: n = a, g, c, or t
  variation 9: n = a, g, c, or t
  variation 10: s = g or c
  Primer TC30
gccctggnnsgcggccatc

SEQ ID NO: 384 - DNA, 20 bp, Artificial Sequence
  variation 8: n = a, g, c, or t
  variation 9: n = a, g, c, or t
  variation 10: s = g or c
  Primer TC155
ggagcagnnsaaaatgactg

SEQ ID NO: 385 - DNA, 18 bp, Artificial Sequence
  Primer 717
tttcagtgtggccaaaag

SEQ ID NO: 386 - DNA, 18 bp, Artificial Sequence
  Primer 718
cagagtcttttggccaca

SEQ ID NO: 387 - DNA, 35 bp, Artificial Sequence
  Primer 850
ggggtaccgccaccatgagagccctgctggcgcgc

SEQ ID NO: 388 - DNA, 33 bp, Artificial Sequence
  Primer 851
gctctagatcatcagagggccaggccattctct

SEQ ID NO: 389 - protein, 5 aa, Artificial Sequence
  mutant P4-P1' RCL loop sequence
PFGRS

SEQ ID NO: 390 - DNA, 44 bp, Artificial Sequence
  PFGRS mutagenesis primer
ccacagctgtcatacccttcggcagaagcgcccccgaggagatc

SEQ ID NO: 391 - protein, 245 aa, Artificial Sequence
  mature chymotrypsin
CGVPAIHPVLSGLSRIVNGEDAVPGSWPWQVSLQDKTGFHFCGGSLISEDWVVTAAHCGVRTSDVVVAGEFDQGSDEENIQVLKIAKVFKNPKFSILTVNNDITLLKLATPARFSQTVSAVCLPSADDDFPAGTLCATTGWGKTKYNANKTPDKLQQAALPLLSNAECKKSWGRRITDVMICAGASGVSSCMGDSGGPLVCQKDGAWTLVGIVSWGSDTCSTSSPGVYARVTKLIPWVQKILAAN

SEQ ID NO: 392 - DNA, 10 bp, Artificial Sequence
  Synthetic linker
aattctatgg

SEQ ID NO: 393 - DNA, 10 bp, Artificial Sequence
  Synthetic linker
tgcaccatag

SEQ ID NO: 394 - DNA, 13 bp, Artificial Sequence
  Synthetic linker
atggaaccctgaa

SEQ ID NO: 395 - DNA, 19 bp, Artificial Sequence
  Synthetic linker
agcttcagggttccatcac

SEQ ID NO: 396 - protein, 380 aa, Artificial Sequence
  PAI-I with MET as cloned into pPAIST7HS
MVHHPPSYVAHLASDFGVRVFQQVAQASKDRNVVFSPYGVASVLAMLQLTTGGETQQQIQAAMGFKIDDKGMAPALRHLYKELMGPWNKDEISTTDAIFVQRDLKLVQGFMPHFFRLFRSTVKQVDFSEVERARFIINDWVKTHTKGMISNLLGKGAVDQLTRLVLVNALYFNGQWKTPFPDSSTHRRLFHKSDGSTVSVPMMAQTNKFNYTEFTTPDGHYYDILELPYHGDTLSMFIAAPYEKEVPLSALTNILSAQLISHWKGNMTRLPRLLVLPKFSLETEVDLRKPLENLGMTDMFRQFQADFTSLSDQEPLHVAQALQKVKIEVNESGTVASSSTAVIVSARMAPEEIIMDRPFLFVVRHNPTGTVLFMGQVMEP

SEQ ID NO: 397 - protein, 21 aa, Artificial Sequence
  Manduca sexta serpin 1B RSL loop
EGAEAAAANAFGIVPKSLILY

SEQ ID NO: 398 - protein, 21 aa, Artificial Sequence
  Manduca sexta serpin 1K RSL loop
EGAEAAAANAFKITTYSFHFV

SEQ ID NO: 399 - protein, 21 aa, Artificial Sequence
  1-antichymotrypsin RSL loop
EGTEASAATAVKITLLSALVE

SEQ ID NO: 400 - protein, 21 aa, Artificial Sequence
  Antithrombin-III RSL loop
EGSEAAASTAVVIAGRSLNPN

SEQ ID NO: 401 - protein, 21 aa, Artificial Sequence
  PAI-II RSL loop
EGTEAAAGTGGVMTGRTGHGG

SEQ ID NO: 402 - protein, 21 aa, Artificial Sequence
  1-antitrypsin RSL loop
KGTEAAGAMFLEAIPMSIPPE

SEQ ID NO: 403 - protein, 21 aa, Artificial Sequence
  PAI-I RSL loop
SGTVASSSTAVIVSARMAPEE

SEQ ID NO: 404 - protein, 21 aa, Artificial Sequence
  PAI-III RSL loop
SGTRAAAATGTIFTFRSARLN

SEQ ID NO: 405 - protein, 21 aa, Artificial Sequence
  Ovalbumin RSL loop
AGREVVGSAEAGVDAASVSEE

SEQ ID NO: 406 - protein, 4 aa, Artificial Sequence
  TNF- alpha cleavage sequence
AEAK

SEQ ID NO: 407 - protein, 4 aa, Artificial Sequence
  TNF-R1 cleavage sequence (1)
ENVK

SEQ ID NO: 408 - protein, 4 aa, Artificial Sequence
  TNF-R1 cleavage sequence (2)
GTED

SEQ ID NO: 409 - protein, 4 aa, Artificial Sequence
  TNF-R2 cleavage sequence (1)
SPTR

SEQ ID NO: 410 - protein, 4 aa, Artificial Sequence
  TNF-R2 cleavage sequence (2)
VSTR

SEQ ID NO: 411 - protein, 4 aa, Artificial Sequence
  TNF-R2 cleavage sequence (3)
STSF

SEQ ID NO: 412 - protein, 4 aa, Artificial Sequence
  HER-2 cleavage sequence (1)
KFPD

SEQ ID NO: 413 - protein, 4 aa, Artificial Sequence
  HER-2 cleavage sequence (2)
AEQR

SEQ ID NO: 414 - protein, 4 aa, Artificial Sequence
  EGFR cleavage sequence (1)
KYAD

SEQ ID NO: 415 - protein, 4 aa, Artificial Sequence
  EGFR cleavage sequence (2)
NGPK

SEQ ID NO: 416 - protein, 4 aa, Artificial Sequence
  VEGFR-1 cleavage sequence (1)
SSAY

SEQ ID NO: 417 - protein, 4 aa, Artificial Sequence
  VEGFR-1 cleavage sequence (2)
GTSD

SEQ ID NO: 418 - protein, 4 aa, Artificial Sequence
  VEGFR-2 cleavage sequence (1)
AQEK

SEQ ID NO: 419 - protein, 4 aa, Artificial Sequence
  VEGFR-2 cleavage sequence (2)
RIDY

SEQ ID NO: 420 - protein, 4 aa, Artificial Sequence
  C3 cleavage sequence (1)
REFK

SEQ ID NO: 421 - protein, 4 aa, Artificial Sequence
  C3 cleavage sequence (2)
GLAR

SEQ ID NO: 422 - protein, 4 aa, Artificial Sequence
  C3 cleavage sequence (3)
RLGR

SEQ ID NO: 423 - protein, 4 aa, Artificial Sequence
  C3 cleavage sequence (4)
AEGK

SEQ ID NO: 424 - protein, 4 aa, Artificial Sequence
  C3 cleavage sequence (5)
QHAR

SEQ ID NO: 425 - protein, 4 aa, Artificial Sequence
  C3 cleavage sequence (6)
LPSR

SEQ ID NO: 426 - protein, 4 aa, Artificial Sequence
  C3 cleavage sequence (7)
SLLR

SEQ ID NO: 427 - protein, 4 aa, Artificial Sequence
  C3 cleavage sequence (8)
LGLA

SEQ ID NO: 428 - protein, 4 aa, Artificial Sequence
  C3 cleavage sequence (9)
LSVV

SEQ ID NO: 429 - protein, 4 aa, Artificial Sequence
  C4 cleavage sequence (1)
HRGR

SEQ ID NO: 430 - protein, 4 aa, Artificial Sequence
  C2 cleavage sequence (1)
GATR

SEQ ID NO: 431 - protein, 4 aa, Artificial Sequence
  C2 cleavage sequence (2)
SLGR

SEQ ID NO: 432 - protein, 4 aa, Artificial Sequence
  C2 cleavage sequence (3)
VFAK

SEQ ID NO: 433 - protein, 411 aa, Artificial Sequence
  urokinase plasminogen activator (uPA) preproprotein
SNELHQVPSNCDCLNGGTCVSNKYFSNIHWCNCPKKFGGQHCEIDKSKTCYEGNGHFYRGKASTDTMGRPCLPWNSATVLQQTYHAHRSDALQLGLGKHNYCRNPDNRRRPWCYVQVGLKPLVQECMVHDCADGKKPSSPPEELKFQCGQKTLRPRFKIIGGEFTTIENQPWFAAIYRRHRGGSVTYVCGGSLISPCWVISATHCFIDYPKKEDYIVYLGRSRLNSNTQGEMKFEVENLILHKDYSADTLAHHNDIALLKIRSKEGRCAQPSRTIQTICLPSMYNDPQFGTSCEITGFGKENSTDYLYPEQLKMTVVKLISHRECQQPHYYGSEVTTKMLCAADPQWKTDSCQGDSGGPLVCSLQGRMTLTGIVSWGRGCALKDKPGVYTRVSHFLPWIRSHTKEENGLAL

SEQ ID NO: 434 - protein, 411 aa, Artificial Sequence
  AR73 F173I; F30I (CHYM SYSTEM)
SNELHQVPSNCDCLNGGTCVSNKYFSNIHWCNCPKKFGGQHCEIDKSKTCYEGNGHFYRGKASTDTMGRPCLPWNSATVLQQTYHAHRSDALQLGLGKHNYCRNPDNRRRPWCYVQVGLKPLVQECMVHDCADGKKPSSPPEELKFQCGQKTLRPRFKIIGGEFTTIENQPWIAAIYRRHRGGSVTYVCGGSLISPCWVISATHCFIDYPKKEDYIVYLGRSRLNSNTQGEMKFEVENLILHKDYSADTLAHHNDIALLKIRSKEGRCAQPSRTIQTICLPSMYNDPQFGTSCEITGFGKENSTDYLYPEQLKMTVVKLISHRECQQPHYYGSEVTTKMLCAADPQWKTDSCQGDSGGPLVCSLQGRMTLTGIVSWGRGCALKDKPGVYTRVSHFLPWIRSHTKEENGLAL

SEQ ID NO: 435 - protein, 411 aa, Artificial Sequence
  AR81 L224A, I240V; L73A, I89V (CHYM SYSTEM)
SNELHQVPSNCDCLNGGTCVSNKYFSNIHWCNCPKKFGGQHCEIDKSKTCYEGNGHFYRGKASTDTMGRPCLPWNSATVLQQTYHAHRSDALQLGLGKHNYCRNPDNRRRPWCYVQVGLKPLVQECMVHDCADGKKPSSPPEELKFQCGQKTLRPRFKIIGGEFTTIENQPWFAAIYRRHRGGSVTYVCGGSLISPCWVISATHCFIDYPKKEDYIVYLGRSRANSNTQGEMKFEVENLVLHKDYSADTLAHHNDIALLKIRSKEGRCAQPSRTIQTICLPSMYNDPQFGTSCEITGFGKENSTDYLYPEQLKMTVVKLISHRECQQPHYYGSEVTTKMLCAADPQWKTDSCQGDSGGPLVCSLQGRMTLTGIVSWGRGCALKDKPGVYTRVSHFLPWIRSHTKEENGLAL

SEQ ID NO: 436 - protein, 411 aa, Artificial Sequence
  AR1 L224P; L73P (CHYM SYSTEM)
SNELHQVPSNCDCLNGGTCVSNKYFSNIHWCNCPKKFGGQHCEIDKSKTCYEGNGHFYRGKASTDTMGRPCLPWNSATVLQQTYHAHRSDALQLGLGKHNYCRNPDNRRRPWCYVQVGLKPLVQECMVHDCADGKKPSSPPEELKFQCGQKTLRPRFKIIGGEFTTIENQPWFAAIYRRHRGGSVTYVCGGSLISPCWVISATHCFIDYPKKEDYIVYLGRSRPNSNTQGEMKFEVENLILHKDYSADTLAHHNDIALLKIRSKEGRCAQPSRTIQTICLPSMYNDPQFGTSCEITGFGKENSTDYLYPEQLKMTVVKLISHRECQQPHYYGSEVTTKMLCAADPQWKTDSCQGDSGGPLVCSLQGRMTLTGIVSWGRGCALKDKPGVYTRVSHFLPWIRSHTKEENGLAL

SEQ ID NO: 437 - protein, 411 aa, Artificial Sequence
  AR3 R378C; R217C (CHYM SYSTEM)
SNELHQVPSNCDCLNGGTCVSNKYFSNIHWCNCPKKFGGQHCEIDKSKTCYEGNGHFYRGKASTDTMGRPCLPWNSATVLQQTYHAHRSDALQLGLGKHNYCRNPDNRRRPWCYVQVGLKPLVQECMVHDCADGKKPSSPPEELKFQCGQKTLRPRFKIIGGEFTTIENQPWFAAIYRRHRGGSVTYVCGGSLISPCWVISATHCFIDYPKKEDYIVYLGRSRLNSNTQGEMKFEVENLILHKDYSADTLAHHNDIALLKIRSKEGRCAQPSRTIQTICLPSMYNDPQFGTSCEITGFGKENSTDYLYPEQLKMTVVKLISHRECQQPHYYGSEVTTKMLCAADPQWKTDSCQGDSGGPLVCSLQGRMTLTGIVSWGCGCALKDKPGVYTRVSHFLPWIRSHTKEENGLAL

SEQ ID NO: 438 - protein, 411 aa, Artificial Sequence
  AR4 L312P; L155P (CHYM SYSTEM)
SNELHQVPSNCDCLNGGTCVSNKYFSNIHWCNCPKKFGGQHCEIDKSKTCYEGNGHFYRGKASTDTMGRPCLPWNSATVLQQTYHAHRSDALQLGLGKHNYCRNPDNRRRPWCYVQVGLKPLVQECMVHDCADGKKPSSPPEELKFQCGQKTLRPRFKIIGGEFTTIENQPWFAAIYRRHRGGSVTYVCGGSLISPCWVISATHCFIDYPKKEDYIVYLGRSRLNSNTQGEMKFEVENLILHKDYSADTLAHHNDIALLKIRSKEGRCAQPSRTIQTICLPSMYNDPQFGTSCEITGFGKENSTDYLYPEQPKMTVVKLISHRECQQPHYYGSEVTTKMLCAADPQWKTDSCQGDSGGPLVCSLQGRMTLTGIVSWGRGCALKDKPGVYTRVSHFLPWIRSHTKEENGLAL

SEQ ID NO: 439 - protein, 411 aa, Artificial Sequence
  AR7 S226P, I240V, I298T; S75P, I89V, I138T (CHYM SYSTEM)
SNELHQVPSNCDCLNGGTCVSNKYFSNIHWCNCPKKFGGQHCEIDKSKTCYEGNGHFYRGKASTDTMGRPCLPWNSATVLQQTYHAHRSDALQLGLGKHNYCRNPDNRRRPWCYVQVGLKPLVQECMVHDCADGKKPSSPPEELKFQCGQKTLRPRFKIIGGEFTTIENQPWFAAIYRRHRGGSVTYVCGGSLISPCWVISATHCFIDYPKKEDYIVYLGRSRLNPNTQGEMKFEVENLVLHKDYSADTLAHHNDIALLKIRSKEGRCAQPSRTIQTICLPSMYNDPQFGTSCETTGFGKENSTDYLYPEQLKMTVVKLISHRECQQPHYYGSEVTTKMLCAADPQWKTDSCQGDSGGPLVCSLQGRMTLTGIVSWGRGCALKDKPGVYTRVSHFLPWIRSHTKEENGLAL

SEQ ID NO: 440 - protein, 411 aa, Artificial Sequence
  AR32 E294G; E137G (CHYM SYSTEM)
SNELHQVPSNCDCLNGGTCVSNKYFSNIHWCNCPKKFGGQHCEIDKSKTCYEGNGHFYRGKASTDTMGRPCLPWNSATVLQQTYHAHRSDALQLGLGKHNYCRNPDNRRRPWCYVQVGLKPLVQECMVHDCADGKKPSSPPEELKFQCGQKTLRPRFKIIGGEFTTIENQPWFAAIYRRHRGGSVTYVCGGSLISPCWVISATHCFIDYPKKEDYIVYLGRSRLNSNTQGEMKFEVENLILHKDYSADTLAHHNDIALLKIRSKEGRCAQPSRTIQTICLPSMYNDPQFGTSCGITGFGKENSTDYLYPEQLKMTVVKLISHRECQQPHYYGSEVTTKMLCAADPQWKTDSCQGDSGGPLVCSLQGRMTLTGIVSWGRGCALKDKPGVYTRVSHFLPWIRSHTKEENGLAL

SEQ ID NO: 441 - protein, 411 aa, Artificial Sequence
  AR36 R223G, L312P; R72G, L155P (CHYM SYSTEM)
SNELHQVPSNCDCLNGGTCVSNKYFSNIHWCNCPKKFGGQHCEIDKSKTCYEGNGHFYRGKASTDTMGRPCLPWNSATVLQQTYHAHRSDALQLGLGKHNYCRNPDNRRRPWCYVQVGLKPLVQECMVHDCADGKKPSSPPEELKFQCGQKTLRPRFKIIGGEFTTIENQPWFAAIYRRHRGGSVTYVCGGSLISPCWVISATHCFIDYPKKEDYIVYLGRSGLNSNTQGEMKFEVENLILHKDYSADTLAHHNDIALLKIRSKEGRCAQPSRTIQTICLPSMYNDPQFGTSCEITGFGKENSTDYLYPEQPKMTVVKLISHRECQQPHYYGSEVTTKMLCAADPQWKTDSCQGDSGGPLVCSLQGRMTLTGIVSWGRGCALKDKPGVYTRVSHFLPWIRSHTKEENGLAL

SEQ ID NO: 442 - protein, 411 aa, Artificial Sequence
  AR37 G290D; G133D (CHYM SYSTEM)
SNELHQVPSNCDCLNGGTCVSNKYFSNIHWCNCPKKFGGQHCEIDKSKTCYEGNGHFYRGKASTDTMGRPCLPWNSATVLQQTYHAHRSDALQLGLGKHNYCRNPDNRRRPWCYVQVGLKPLVQECMVHDCADGKKPSSPPEELKFQCGQKTLRPRFKIIGGEFTTIENQPWFAAIYRRHRGGSVTYVCGGSLISPCWVISATHCFIDYPKKEDYIVYLGRSRLNSNTQGEMKFEVENLILHKDYSADTLAHHNDIALLKIRSKEGRCAQPSRTIQTICLPSMYNDPQFDTSCEITGFGKENSTDYLYPEQLKMTVVKLISHRECQQPHYYGSEVTTKMLCAADPQWKTDSCQGDSGGPLVCSLQGRMTLTGIVSWGRGCALKDKPGVYTRVSHFLPWIRSHTKEENGLAL

SEQ ID NO: 443 - protein, 411 aa, Artificial Sequence
  AR66 V317A; V160A (CHYM SYSTEM)
SNELHQVPSNCDCLNGGTCVSNKYFSNIHWCNCPKKFGGQHCEIDKSKTCYEGNGHFYRGKASTDTMGRPCLPWNSATVLQQTYHAHRSDALQLGLGKHNYCRNPDNRRRPWCYVQVGLKPLVQECMVHDCADGKKPSSPPEELKFQCGQKTLRPRFKIIGGEFTTIENQPWFAAIYRRHRGGSVTYVCGGSLISPCWVISATHCFIDYPKKEDYIVYLGRSRLNSNTQGEMKFEVENLILHKDYSADTLAHHNDIALLKIRSKEGRCAQPSRTIQTICLPSMYNDPQFGTSCEITGFGKENSTDYLYPEQLKMTVAKLISHRECQQPHYYGSEVTTKMLCAADPQWKTDSCQGDSGGPLVCSLQGRMTLTGIVSWGRGCALKDKPGVYTRVSHFLPWIRSHTKEENGLAL

SEQ ID NO: 444 - protein, 411 aa, Artificial Sequence
  AR24 V185D; V38D (CHYM SYSTEM)
SNELHQVPSNCDCLNGGTCVSNKYFSNIHWCNCPKKFGGQHCEIDKSKTCYEGNGHFYRGKASTDTMGRPCLPWNSATVLQQTYHAHRSDALQLGLGKHNYCRNPDNRRRPWCYVQVGLKPLVQECMVHDCADGKKPSSPPEELKFQCGQKTLRPRFKIIGGEFTTIENQPWFAAIYRRHRGGSDTYVCGGSLISPCWVISATHCFIDYPKKEDYIVYLGRSRLNSNTQGEMKFEVENLILHKDYSADTLAHHNDIALLKIRSKEGRCAQPSRTIQTICLPSMYNDPQFGTSCEITGFGKENSTDYLYPEQLKMTVVKLISHRECQQPHYYGSEVTTKMLCAADPQWKTDSCQGDSGGPLVCSLQGRMTLTGIVSWGRGCALKDKPGVYTRVSHFLPWIRSHTKEENGLAL

SEQ ID NO: 445 - protein, 411 aa, Artificial Sequence
  AR85 F289L, V317A; F132L, V160A (CHYM SYSTEM)
SNELHQVPSNCDCLNGGTCVSNKYFSNIHWCNCPKKFGGQHCEIDKSKTCYEGNGHFYRGKASTDTMGRPCLPWNSATVLQQTYHAHRSDALQLGLGKHNYCRNPDNRRRPWCYVQVGLKPLVQECMVHDCADGKKPSSPPEELKFQCGQKTLRPRFKIIGGEFTTIENQPWFAAIYRRHRGGSVTYVCGGSLISPCWVISATHCFIDYPKKEDYIVYLGRSRLNSNTQGEMKFEVENLILHKDYSADTLAHHNDIALLKIRSKEGRCAQPSRTIQTICLPSMYNDPQLGTSCEITGFGKENSTDYLYPEQLKMTVAKLISHRECQQPHYYGSEVTTKMLCAADPQWKTDSCQGDSGGPLVCSLQGRMTLTGIVSWGRGCALKDKPGVYTRVSHFLPWIRSHTKEENGLAL

SEQ ID NO: 446 - protein, 411 aa, Artificial Sequence
  ARF2 F173T, L224A, I240V; F30T, L73A, I189V (CHYM SYSTEM)
SNELHQVPSNCDCLNGGTCVSNKYFSNIHWCNCPKKFGGQHCEIDKSKTCYEGNGHFYRGKASTDTMGRPCLPWNSATVLQQTYHAHRSDALQLGLGKHNYCRNPDNRRRPWCYVQVGLKPLVQECMVHDCADGKKPSSPPEELKFQCGQKTLRPRFKIIGGEFTTIENQPWTAAIYRRHRGGSVTYVCGGSLISPCWVISATHCFIDYPKKEDYIVYLGRSRANSNTQGEMKFEVENLVLHKDYSADTLAHHNDIALLKIRSKEGRCAQPSRTIQTICLPSMYNDPQFGTSCEITGFGKENSTDYLYPEQLKMTVVKLISHRECQQPHYYGSEVTTKMLCAADPQWKTDSCQGDSGGPLVCSLQGRMTLTGIVSWGRGCALKDKPGVYTRVSHFLPWIRSHTKEENGLAL

SEQ ID NO: 447 - protein, 411 aa, Artificial Sequence
  ARF6 F173L, L224A, I240V; F30L, L73A, I189V  (CHYM SYSTEM)
SNELHQVPSNCDCLNGGTCVSNKYFSNIHWCNCPKKFGGQHCEIDKSKTCYEGNGHFYRGKASTDTMGRPCLPWNSATVLQQTYHAHRSDALQLGLGKHNYCRNPDNRRRPWCYVQVGLKPLVQECMVHDCADGKKPSSPPEELKFQCGQKTLRPRFKIIGGEFTTIENQPWLAAIYRRHRGGSVTYVCGGSLISPCWVISATHCFIDYPKKEDYIVYLGRSRANSNTQGEMKFEVENLVLHKDYSADTLAHHNDIALLKIRSKEGRCAQPSRTIQTICLPSMYNDPQFGTSCEITGFGKENSTDYLYPEQLKMTVVKLISHRECQQPHYYGSEVTTKMLCAADPQWKTDSCQGDSGGPLVCSLQGRMTLTGIVSWGRGCALKDKPGVYTRVSHFLPWIRSHTKEENGLAL

SEQ ID NO: 448 - protein, 411 aa, Artificial Sequence
  ARF11 F173V, L224A, I240V; F30V, L73A, I189V  (CHYM SYSTEM)
SNELHQVPSNCDCLNGGTCVSNKYFSNIHWCNCPKKFGGQHCEIDKSKTCYEGNGHFYRGKASTDTMGRPCLPWNSATVLQQTYHAHRSDALQLGLGKHNYCRNPDNRRRPWCYVQVGLKPLVQECMVHDCADGKKPSSPPEELKFQCGQKTLRPRFKIIGGEFTTIENQPWVAAIYRRHRGGSVTYVCGGSLISPCWVISATHCFIDYPKKEDYIVYLGRSRANSNTQGEMKFEVENLVLHKDYSADTLAHHNDIALLKIRSKEGRCAQPSRTIQTICLPSMYNDPQFGTSCEITGFGKENSTDYLYPEQLKMTVVKLISHRECQQPHYYGSEVTTKMLCAADPQWKTDSCQGDSGGPLVCSLQGRMTLTGIVSWGRGCALKDKPGVYTRVSHFLPWIRSHTKEENGLAL

SEQ ID NO: 449 - protein, 411 aa, Artificial Sequence
  ARF17 F173G, L224A, I240V; F30G, L73A, I189V  (CHYM SYSTEM)
SNELHQVPSNCDCLNGGTCVSNKYFSNIHWCNCPKKFGGQHCEIDKSKTCYEGNGHFYRGKASTDTMGRPCLPWNSATVLQQTYHAHRSDALQLGLGKHNYCRNPDNRRRPWCYVQVGLKPLVQECMVHDCADGKKPSSPPEELKFQCGQKTLRPRFKIIGGEFTTIENQPWGAAIYRRHRGGSVTYVCGGSLISPCWVISATHCFIDYPKKEDYIVYLGRSRANSNTQGEMKFEVENLVLHKDYSADTLAHHNDIALLKIRSKEGRCAQPSRTIQTICLPSMYNDPQFGTSCEITGFGKENSTDYLYPEQLKMTVVKLISHRECQQPHYYGSEVTTKMLCAADPQWKTDSCQGDSGGPLVCSLQGRMTLTGIVSWGRGCALKDKPGVYTRVSHFLPWIRSHTKEENGLAL

SEQ ID NO: 450 - protein, 411 aa, Artificial Sequence; identical to SEQ ID NO: 447
  ARF16 F173L, L224A, I240V; F30L, L73A, I189V  (CHYM SYSTEM)

SEQ ID NO: 451 - protein, 411 aa, Artificial Sequence
  ARF33 L224A, I240V, L312V; L155V, L73A, I189V  (CHYM SYSTEM)
SNELHQVPSNCDCLNGGTCVSNKYFSNIHWCNCPKKFGGQHCEIDKSKTCYEGNGHFYRGKASTDTMGRPCLPWNSATVLQQTYHAHRSDALQLGLGKHNYCRNPDNRRRPWCYVQVGLKPLVQECMVHDCADGKKPSSPPEELKFQCGQKTLRPRFKIIGGEFTTIENQPWFAAIYRRHRGGSVTYVCGGSLISPCWVISATHCFIDYPKKEDYIVYLGRSRANSNTQGEMKFEVENLVLHKDYSADTLAHHNDIALLKIRSKEGRCAQPSRTIQTICLPSMYNDPQFGTSCEITGFGKENSTDYLYPEQVKMTVVKLISHRECQQPHYYGSEVTTKMLCAADPQWKTDSCQGDSGGPLVCSLQGRMTLTGIVSWGRGCALKDKPGVYTRVSHFLPWIRSHTKEENGLAL

SEQ ID NO: 452 - protein, 411 aa, Artificial Sequence
  ARF35 F173M, L224A, I240V; F30M, L73A, I189V  (CHYM SYSTEM)
SNELHQVPSNCDCLNGGTCVSNKYFSNIHWCNCPKKFGGQHCEIDKSKTCYEGNGHFYRGKASTDTMGRPCLPWNSATVLQQTYHAHRSDALQLGLGKHNYCRNPDNRRRPWCYVQVGLKPLVQECMVHDCADGKKPSSPPEELKFQCGQKTLRPRFKIIGGEFTTIENQPWMAAIYRRHRGGSVTYVCGGSLISPCWVISATHCFIDYPKKEDYIVYLGRSRANSNTQGEMKFEVENLVLHKDYSADTLAHHNDIALLKIRSKEGRCAQPSRTIQTICLPSMYNDPQFGTSCEITGFGKENSTDYLYPEQLKMTVVKLISHRECQQPHYYGSEVTTKMLCAADPQWKTDSCQGDSGGPLVCSLQGRMTLTGIVSWGRGCALKDKPGVYTRVSHFLPWIRSHTKEENGLAL

SEQ ID NO: 453 - protein, 411 aa, Artificial Sequence
  ARF36 L224A, L312M; L155M, L73A, I189V  (CHYM SYSTEM)
SNELHQVPSNCDCLNGGTCVSNKYFSNIHWCNCPKKFGGQHCEIDKSKTCYEGNGHFYRGKASTDTMGRPCLPWNSATVLQQTYHAHRSDALQLGLGKHNYCRNPDNRRRPWCYVQVGLKPLVQECMVHDCADGKKPSSPPEELKFQCGQKTLRPRFKIIGGEFTTIENQPWFAAIYRRHRGGSVTYVCGGSLISPCWVISATHCFIDYPKKEDYIVYLGRSRANSNTQGEMKFEVENLVLHKDYSADTLAHHNDIALLKIRSKEGRCAQPSRTIQTICLPSMYNDPQFGTSCEITGFGKENSTDYLYPEQMKMTVVKLISHRECQQPHYYGSEVTTKMLCAADPQWKTDSCQGDSGGPLVCSLQGRMTLTGIVSWGRGCALKDKPGVYTRVSHFLPWIRSHTKEENGLAL

SEQ ID NO: 454 - protein, 411 aa, Artificial Sequence; identical to SEQ ID NO: 452
  ARF37 F173M, L224A, I240V; F30M, L73A, I189V  (CHYM SYSTEM)

SEQ ID NO: 455 - protein, 411 aa, Artificial Sequence; identical to SEQ ID NO: 447
  ARF43 F173L, L224A, I240V; F30L, L73A, I189V  (CHYM SYSTEM)

SEQ ID NO: 456 - protein, 411 aa, Artificial Sequence; identical to SEQ ID NO: 448
  ARF47 F173V, L224A, I240V; F30V, L73A, I189V  (CHYM SYSTEM)

SEQ ID NO: 457 - protein, 411 aa, Artificial Sequence
  ARF48 F173L, L224A, I240V, L312M; F30L, L155M, L73A, I189V  (CHYM SYSTEM)
SNELHQVPSNCDCLNGGTCVSNKYFSNIHWCNCPKKFGGQHCEIDKSKTCYEGNGHFYRGKASTDTMGRPCLPWNSATVLQQTYHAHRSDALQLGLGKHNYCRNPDNRRRPWCYVQVGLKPLVQECMVHDCADGKKPSSPPEELKFQCGQKTLRPRFKIIGGEFTTIENQPWLAAIYRRHRGGSVTYVCGGSLISPCWVISATHCFIDYPKKEDYIVYLGRSRANSNTQGEMKFEVENLVLHKDYSADTLAHHNDIALLKIRSKEGRCAQPSRTIQTICLPSMYNDPQFGTSCEITGFGKENSTDYLYPEQMKMTVVKLISHRECQQPHYYGSEVTTKMLCAADPQWKTDSCQGDSGGPLVCSLQGRMTLTGIVSWGRGCALKDKPGVYTRVSHFLPWIRSHTKEENGLAL

SEQ ID NO: 458 - protein, 411 aa, Artificial Sequence; identical to SEQ ID NO: 447
  ARF103 F173L, L224A, I240V; F30L, L73A, I189V  (CHYM SYSTEM)

SEQ ID NO: 459 - protein, 411 aa, Artificial Sequence
  ARF115 F173G, L224A, I240V, L312M; F30G, L155M, L73A, I189V  (CHYM SYSTEM)
SNELHQVPSNCDCLNGGTCVSNKYFSNIHWCNCPKKFGGQHCEIDKSKTCYEGNGHFYRGKASTDTMGRPCLPWNSATVLQQTYHAHRSDALQLGLGKHNYCRNPDNRRRPWCYVQVGLKPLVQECMVHDCADGKKPSSPPEELKFQCGQKTLRPRFKIIGGEFTTIENQPWGAAIYRRHRGGSVTYVCGGSLISPCWVISATHCFIDYPKKEDYIVYLGRSRANSNTQGEMKFEVENLVLHKDYSADTLAHHNDIALLKIRSKEGRCAQPSRTIQTICLPSMYNDPQFGTSCEITGFGKENSTDYLYPEQMKMTVVKLISHRECQQPHYYGSEVTTKMLCAADPQWKTDSCQGDSGGPLVCSLQGRMTLTGIVSWGRGCALKDKPGVYTRVSHFLPWIRSHTKEENGLAL

SEQ ID NO: 460 - protein, 411 aa, Artificial Sequence
  uPA/Ia  F164V; F21V (CHYM SYSTEM)
SNELHQVPSNCDCLNGGTCVSNKYFSNIHWCNCPKKFGGQHCEIDKSKTCYEGNGHFYRGKASTDTMGRPCLPWNSATVLQQTYHAHRSDALQLGLGKHNYCRNPDNRRRPWCYVQVGLKPLVQECMVHDCADGKKPSSPPEELKFQCGQKTLRPRFKIIGGEVTTIENQPWFAAIYRRHRGGSVTYVCGGSLISPCWVISATHCFIDYPKKEDYIVYLGRSRLNSNTQGEMKFEVENLILHKDYSADTLAHHNDIALLKIRSKEGRCAQPSRTIQTICLPSMYNDPQFGTSCEITGFGKENSTDYLYPEQLKMTVVKLISHRECQQPHYYGSEVTTKMLCAADPQWKTDSCQGDSGGPLVCSLQGRMTLTGIVSWGRGCALKDKPGVYTRVSHFLPWIRSHTKEENGLAL

SEQ ID NO: 461 - protein, 411 aa, Artificial Sequence
  uPA/Ib  I167L; I24L (CHYM SYSTEM)
SNELHQVPSNCDCLNGGTCVSNKYFSNIHWCNCPKKFGGQHCEIDKSKTCYEGNGHFYRGKASTDTMGRPCLPWNSATVLQQTYHAHRSDALQLGLGKHNYCRNPDNRRRPWCYVQVGLKPLVQECMVHDCADGKKPSSPPEELKFQCGQKTLRPRFKIIGGEFTTLENQPWFAAIYRRHRGGSVTYVCGGSLISPCWVISATHCFIDYPKKEDYIVYLGRSRLNSNTQGEMKFEVENLILHKDYSADTLAHHNDIALLKIRSKEGRCAQPSRTIQTICLPSMYNDPQFGTSCEITGFGKENSTDYLYPEQLKMTVVKLISHRECQQPHYYGSEVTTKMLCAADPQWKTDSCQGDSGGPLVCSLQGRMTLTGIVSWGRGCALKDKPGVYTRVSHFLPWIRSHTKEENGLAL

SEQ ID NO: 462 - protein, 411 aa, Artificial Sequence
  uPA/Ic F173V; F30V (CHYM SYSTEM)
SNELHQVPSNCDCLNGGTCVSNKYFSNIHWCNCPKKFGGQHCEIDKSKTCYEGNGHFYRGKASTDTMGRPCLPWNSATVLQQTYHAHRSDALQLGLGKHNYCRNPDNRRRPWCYVQVGLKPLVQECMVHDCADGKKPSSPPEELKFQCGQKTLRPRFKIIGGEFTTIENQPWVAAIYRRHRGGSVTYVCGGSLISPCWVISATHCFIDYPKKEDYIVYLGRSRLNSNTQGEMKFEVENLILHKDYSADTLAHHNDIALLKIRSKEGRCAQPSRTIQTICLPSMYNDPQFGTSCEITGFGKENSTDYLYPEQLKMTVVKLISHRECQQPHYYGSEVTTKMLCAADPQWKTDSCQGDSGGPLVCSLQGRMTLTGIVSWGRGCALKDKPGVYTRVSHFLPWIRSHTKEENGLAL

SEQ ID NO: 463 - protein, 411 aa, Artificial Sequence
  uPA/Id F173L; F30L (CHYM SYSTEM)
SNELHQVPSNCDCLNGGTCVSNKYFSNIHWCNCPKKFGGQHCEIDKSKTCYEGNGHFYRGKASTDTMGRPCLPWNSATVLQQTYHAHRSDALQLGLGKHNYCRNPDNRRRPWCYVQVGLKPLVQECMVHDCADGKKPSSPPEELKFQCGQKTLRPRFKIIGGEFTTIENQPWLAAIYRRHRGGSVTYVCGGSLISPCWVISATHCFIDYPKKEDYIVYLGRSRLNSNTQGEMKFEVENLILHKDYSADTLAHHNDIALLKIRSKEGRCAQPSRTIQTICLPSMYNDPQFGTSCEITGFGKENSTDYLYPEQLKMTVVKLISHRECQQPHYYGSEVTTKMLCAADPQWKTDSCQGDSGGPLVCSLQGRMTLTGIVSWGRGCALKDKPGVYTRVSHFLPWIRSHTKEENGLAL

SEQ ID NO: 464 - protein, 411 aa, Artificial Sequence
  uPA/IIa F173V, Y209H; F30V, Y61aH (CHYM SYSTEM)
SNELHQVPSNCDCLNGGTCVSNKYFSNIHWCNCPKKFGGQHCEIDKSKTCYEGNGHFYRGKASTDTMGRPCLPWNSATVLQQTYHAHRSDALQLGLGKHNYCRNPDNRRRPWCYVQVGLKPLVQECMVHDCADGKKPSSPPEELKFQCGQKTLRPRFKIIGGEFTTIENQPWVAAIYRRHRGGSVTYVCGGSLISPCWVISATHCFIDHPKKEDYIVYLGRSRLNSNTQGEMKFEVENLILHKDYSADTLAHHNDIALLKIRSKEGRCAQPSRTIQTICLPSMYNDPQFGTSCEITGFGKENSTDYLYPEQLKMTVVKLISHRECQQPHYYGSEVTTKMLCAADPQWKTDSCQGDSGGPLVCSLQGRMTLTGIVSWGRGCALKDKPGVYTRVSHFLPWIRSHTKEENGLAL

SEQ ID NO: 465 - protein, 411 aa, Artificial Sequence
  uPA/IIb F173V, K233E; F30V, K82E (CHYM SYSTEM)
SNELHQVPSNCDCLNGGTCVSNKYFSNIHWCNCPKKFGGQHCEIDKSKTCYEGNGHFYRGKASTDTMGRPCLPWNSATVLQQTYHAHRSDALQLGLGKHNYCRNPDNRRRPWCYVQVGLKPLVQECMVHDCADGKKPSSPPEELKFQCGQKTLRPRFKIIGGEFTTIENQPWVAAIYRRHRGGSVTYVCGGSLISPCWVISATHCFIDYPKKEDYIVYLGRSRLNSNTQGEMEFEVENLILHKDYSADTLAHHNDIALLKIRSKEGRCAQPSRTIQTICLPSMYNDPQFGTSCEITGFGKENSTDYLYPEQLKMTVVKLISHRECQQPHYYGSEVTTKMLCAADPQWKTDSCQGDSGGPLVCSLQGRMTLTGIVSWGRGCALKDKPGVYTRVSHFLPWIRSHTKEENGLAL

SEQ ID NO: 466 - protein, 411 aa, Artificial Sequence
  uPA/IIc F173V, K313T; F30V, K156T (CHYM SYSTEM)
SNELHQVPSNCDCLNGGTCVSNKYFSNIHWCNCPKKFGGQHCEIDKSKTCYEGNGHFYRGKASTDTMGRPCLPWNSATVLQQTYHAHRSDALQLGLGKHNYCRNPDNRRRPWCYVQVGLKPLVQECMVHDCADGKKPSSPPEELKFQCGQKTLRPRFKIIGGEFTTIENQPWVAAIYRRHRGGSVTYVCGGSLISPCWVISATHCFIDYPKKEDYIVYLGRSRLNSNTQGEMKFEVENLILHKDYSADTLAHHNDIALLKIRSKEGRCAQPSRTIQTICLPSMYNDPQFGTSCEITGFGKENSTDYLYPEQLTMTVVKLISHRECQQPHYYGSEVTTKMLCAADPQWKTDSCQGDSGGPLVCSLQGRMTLTGIVSWGRGCALKDKPGVYTRVSHFLPWIRSHTKEENGLAL

SEQ ID NO: 467 - protein, 411 aa, Artificial Sequence
  uPA/IIIa F173V, K233E, V316A; F30V, K82E, V159A (CHYM SYSTEM)
SNELHQVPSNCDCLNGGTCVSNKYFSNIHWCNCPKKFGGQHCEIDKSKTCYEGNGHFYRGKASTDTMGRPCLPWNSATVLQQTYHAHRSDALQLGLGKHNYCRNPDNRRRPWCYVQVGLKPLVQECMVHDCADGKKPSSPPEELKFQCGQKTLRPRFKIIGGEFTTIENQPWVAAIYRRHRGGSVTYVCGGSLISPCWVISATHCFIDYPKKEDYIVYLGRSRLNSNTQGEMEFEVENLILHKDYSADTLAHHNDIALLKIRSKEGRCAQPSRTIQTICLPSMYNDPQFGTSCEITGFGKENSTDYLYPEQLKMTAVKLISHRECQQPHYYGSEVTTKMLCAADPQWKTDSCQGDSGGPLVCSLQGRMTLTGIVSWGRGCALKDKPGVYTRVSHFLPWIRSHTKEENGLAL

SEQ ID NO: 468 - protein, 411 aa, Artificial Sequence
  uPA/IIIb F173V, K233E, T186A, V316A; F30V, K82E, 39A, V159A (CHYM SYSTEM)
SNELHQVPSNCDCLNGGTCVSNKYFSNIHWCNCPKKFGGQHCEIDKSKTCYEGNGHFYRGKASTDTMGRPCLPWNSATVLQQTYHAHRSDALQLGLGKHNYCRNPDNRRRPWCYVQVGLKPLVQECMVHDCADGKKPSSPPEELKFQCGQKTLRPRFKIIGGEFTTIENQPWVAAIYRRHRGGSVAYVCGGSLISPCWVISATHCFIDYPKKEDYIVYLGRSRLNSNTQGEMEFEVENLILHKDYSADTLAHHNDIALLKIRSKEGRCAQPSRTIQTICLPSMYNDPQFGTSCEITGFGKENSTDYLYPEQLKMTAVKLISHRECQQPHYYGSEVTTKMLCAADPQWKTDSCQGDSGGPLVCSLQGRMTLTGIVSWGRGCALKDKPGVYTRVSHFLPWIRSHTKEENGLAL

SEQ ID NO: 469 - protein, 411 aa, Artificial Sequence
  uPA/IIIc F173V, K233E, T315A, V316A; F30V, K82E, T158A, V159A (CHYM SYSTEM)
SNELHQVPSNCDCLNGGTCVSNKYFSNIHWCNCPKKFGGQHCEIDKSKTCYEGNGHFYRGKASTDTMGRPCLPWNSATVLQQTYHAHRSDALQLGLGKHNYCRNPDNRRRPWCYVQVGLKPLVQECMVHDCADGKKPSSPPEELKFQCGQKTLRPRFKIIGGEFTTIENQPWVAAIYRRHRGGSVTYVCGGSLISPCWVISATHCFIDYPKKEDYIVYLGRSRLNSNTQGEMEFEVENLILHKDYSADTLAHHNDIALLKIRSKEGRCAQPSRTIQTICLPSMYNDPQFGTSCEITGFGKENSTDYLYPEQLKMAAVKLISHRECQQPHYYGSEVTTKMLCAADPQWKTDSCQGDSGGPLVCSLQGRMTLTGIVSWGRGCALKDKPGVYTRVSHFLPWIRSHTKEENGLAL

SEQ ID NO: 470 - protein, 411 aa, Artificial Sequence
  uPA/IIId F173V, Y209H, K243E; F173V, Y61aH, K92E (CHYM SYSTEM)
SNELHQVPSNCDCLNGGTCVSNKYFSNIHWCNCPKKFGGQHCEIDKSKTCYEGNGHFYRGKASTDTMGRPCLPWNSATVLQQTYHAHRSDALQLGLGKHNYCRNPDNRRRPWCYVQVGLKPLVQECMVHDCADGKKPSSPPEELKFQCGQKTLRPRFKIIGGEFTTIENQPWVAAIYRRHRGGSVTYVCGGSLISPCWVISATHCFIDHPKKEDYIVYLGRSRLNSNTQGEMKFEVENLILHEDYSADTLAHHNDIALLKIRSKEGRCAQPSRTIQTICLPSMYNDPQFGTSCEITGFGKENSTDYLYPEQLKMTVVKLISHRECQQPHYYGSEVTTKMLCAADPQWKTDSCQGDSGGPLVCSLQGRMTLTGIVSWGRGCALKDKPGVYTRVSHFLPWIRSHTKEENGLAL

SEQ ID NO: 471 - protein, 411 aa, Artificial Sequence
  uPA/IVa F173V, K233E, V316A, G231E, I240V, K348E; F173V, K82E, V159A, E80G, I89V, K187E (CHYM SYSTEM)
SNELHQVPSNCDCLNGGTCVSNKYFSNIHWCNCPKKFGGQHCEIDKSKTCYEGNGHFYRGKASTDTMGRPCLPWNSATVLQQTYHAHRSDALQLGLGKHNYCRNPDNRRRPWCYVQVGLKPLVQECMVHDCADGKKPSSPPEELKFQCGQKTLRPRFKIIGGEFTTIENQPWVAAIYRRHRGGSVTYVCGGSLISPCWVISATHCFIDYPKKEDYIVYLGRSRLNSNTQGGMEFEVENLVLHKDYSADTLAHHNDIALLKIRSKEGRCAQPSRTIQTICLPSMYNDPQFGTSCEITGFGKENSTDYLYPEQLKMTAVKLISHRECQQPHYYGSEVTTKMLCAADPQWETDSCQGDSGGPLVCSLQGRMTLTGIVSWGRGCALKDKPGVYTRVSHFLPWIRSHTKEENGLAL

SEQ ID NO: 472 - protein, 411 aa, Artificial Sequence
  uPA/IVb F173V, K233E, V316A, G231E, E235K, I240V, K348E; F173V, K82E, V159A, E80G, E89K, I89V, K187E (CHYM SYSTEM)
SNELHQVPSNCDCLNGGTCVSNKYFSNIHWCNCPKKFGGQHCEIDKSKTCYEGNGHFYRGKASTDTMGRPCLPWNSATVLQQTYHAHRSDALQLGLGKHNYCRNPDNRRRPWCYVQVGLKPLVQECMVHDCADGKKPSSPPEELKFQCGQKTLRPRFKIIGGEFTTIENQPWVAAIYRRHRGGSVTYVCGGSLISPCWVISATHCFIDYPKKEDYIVYLGRSRLNSNTQGGMEFKVENLVLHKDYSADTLAHHNDIALLKIRSKEGRCAQPSRTIQTICLPSMYNDPQFGTSCEITGFGKENSTDYLYPEQLKMTAVKLISHRECQQPHYYGSEVTTKMLCAADPQWETDSCQGDSGGPLVCSLQGRMTLTGIVSWGRGCALKDKPGVYTRVSHFLPWIRSHTKEENGLAL

SEQ ID NO: 473 - protein, 299 aa, Autographa californica nucleopolyhedrovirus
  P35 peptide
MCVIFPVEIDVSQTIIRDCQVDKQTRELVYINKIMNTQLTKPVLMMFNISGPIRSVTRKNNNLRDRIKSKVDEQFDQLERDYSDQMDGFHDSIKYFKDEHYSVSCQNGSVLKSKFAKILKSHDYTDKKSIEAYEKYCLPKLVDERNDYYVAVCVLKPGFENGSNQVLSFEYNPIGNKVIVPFAHEINDTGLYEYDVVAYVDSVQFDGEQFEEFVQSLILPSSFKNSEKVLYYNEASKNKSMIYKALEFTTESSWGKSEKYNWKIFCNGFIYDKKSKVLYVKLHNVTSALNKNVILNTIK

SEQ ID NO: 474 - DNA, 2105 bp, Homo sapiens
  Full length u-PA
atgagagccctgctggcgcgcctgcttctctgcgtcctggtcgtgagcgactccaaaggcagcaatgaacttcatcaagttccatcgaactgtgactgtctaaatggaggaacatgtgtgtccaacaagtacttctccaacattcactggtgcaactgcccaaagaaattcggagggcagcactggtgaaatagataagtcaaaaacctgctatgaggggaatggtcacttttaccgaggaaaggccagcactgacaccagttgccggccctgcctgccctggaactctgccactgtccttcagcaaacgtaccatgcccacagatctgatgctcttcagctgggcctggggaaacataattactgcaggaacccagacaaccggaggcgaccctggtgctatgtgcaggtgggcctaaagccgcttgtccaagagtgcatggtgcatgactgcgcagatggaaaaaagccctcctctcctccagaagaattaaaatttcagtgtggccaaaagactctgaggccccgctttgagattattgggggagaattcaccaccatcgagaaccagccctggtttgcggccatctacaggaggcaccgggggggctctgtcacctacgtgtgtggaggcagcctcatcagcccttgctgggtgatcagcgccacacactgcttcattgattacccaaagaaggaggactacatcgtctacctgggtcgctcaaggcttaactccaacacgcaaggggagatgaagtttgaggtggaaaacctcatcctacacaaggactacagcgctgacacgcttgctcaccacaacgacattgccttgctgaagatccgttccaaggagggcaggtgtgcgcagccatcccggactatacagaccatctgcctgccctcgatgtataacgatccccagtttggcacaagctgtgagatcactggctttggaaaagagaattctaccgactatctctatccggagcagctgaaaatgactgttgtgaagctgatttcccaccgggagtgtcagcagccccactactacggctctgaagtcaccaccaaaatgctatgtgctgctgacccccaatggaaaacagattcctgccagggagactcagggggacccctcgtctgttccctccaaggccgcatgactttgactggaattgtgagctggggccgtggatgtgccctgaaggacaagccaggcgtctacacgagagtctcacacttcttaccctggatccgcagtcacaccaaggaagagaatggcctggccctctgagggttttcagtgtggccaaaagactctgaggccccgctttaagattattgggggagaattcaccaccatcgagaaccagccctggtttgcggccatctacaggaggcaccgggggggctctgtcacctacgtgtgtggaggcagcctcatcagcccttgctgggtgatcagcgccacacactgcttcattgattacccaaagaaggaggactacatcgtctacctgggtcgctcaaggcttaactccaacacgcaaggggagatgaagtttgaggtggaaaacctcatcctacacaaggactacagcgctgacacgcttgctcaccacaacgacattgccttgctgaagatccgttccaaggagggcaggtgtgcgcagccatcccggactatacagaccatctgcctgccctcgatgtataacgatccccagtttggcacaagctgtgagatcactggctttggaaaagagaattctaccgactatctctatccggagcagctgaaaatgactgttgtgaagctgatttcccaccgggagtgtcagcagccccactactacggctctgaagtcaccaccaaaatgctatgtgctgctgacccccaatggaaaacagattcctgccagggagactcagggggacccctcgtctgttccctccaaggccgcatgactttgactggaattgtgagctggggccgtggatgtgccctgaaggacaagccaggcgtctacacgagagtctcacacttcttaccctggatccgcagtcacaccaaggaagagaatggcctgccctctgagggt

SEQ ID NO: 475 - DNA, 804 bp, Homo sapiens
  uPA protease domain
tttcagtgtggccaaaagactctgaggccccgctttaagattattgggggagaattcaccaccatcgagaaccagccctggtttgcggccatctacaggaggcaccgggggggctctgtcacctacgtgtgtggaggcagcctcatcagcccttgctgggtgatcagcgccacacactgcttcattgattacccaaagaaggaggactacatcgtctacctgggtcgctcaaggcttaactccaacacgcaaggggagatgaagtttgaggtggaaaacctcatcctacacaaggactacagcgctgacacgcttgctcaccacaacgacattgccttgctgaagatccgttccaaggagggcaggtgtgcgcagccatcccggactatacagaccatctgcctgccctcgatgtataacgatccccagtttggcacaagctgtgagatcactggctttggaaaagagaattctaccgactatctctatccggagcagctgaaaatgactgttgtgaagctgatttcccaccgggagtgtcagcagccccactactacggctctgaagtcaccaccaaaatgctatgtgctgctgacccccaatggaaaacagattcctgccagggagactcagggggacccctcgtctgttccctccaaggccgcatgactttgactggaattgtgagctggggccgtggatgtgccctgaaggacaagccaggcgtctacacgagagtctcacacttcttaccctggatccgcagtcacaccaaggaagagaatggcctgccctctgagggt

SEQ ID NO: 476 - DNA, 22 bp, Artificial Sequence
  Primer UPAF1
atgagagccctgctggcgcgcc

SEQ ID NO: 477 - DNA, 19 bp, Artificial Sequence
  Primer UPAF2
ggaaaagagaattctaccg

SEQ ID NO: 478 - protein, 6 aa, Artificial Sequence
  Synthesized protease cleavage site
IAGRSL

SEQ ID NO: 479 - protein, 6 aa, Artificial Sequence
  Synthesized protease cleavage site
SLGRKI

SEQ ID NO: 480 - protein, 4 aa, Artificial Sequence
  Synthesized protease cleavage site
VLKD

SEQ ID NO: 481 - protein, 4 aa, Artificial Sequence
  Synthesized protease cleavage site
LVED

SEQ ID NO: 482 - protein, 4 aa, Artificial Sequence
  Synthesized protease cleavage site
WFKD

SEQ ID NO: 483 - protein, 4 aa, Artificial Sequence
  Synthesized protease cleavage site
RIYD

SEQ ID NO: 484 - protein, 4 aa, Artificial Sequence
  Synthesized protease cleavage site
KVGR

SEQ ID NO: 485 - protein, 4 aa, Artificial Sequence
  Synthesized protease cleavage site
RVRK

SEQ ID NO: 486 - protein, 4 aa, Artificial Sequence
  Synthesized protease cleavage site
RKTK

SEQ ID NO: 487 - protein, 4 aa, Artificial Sequence
  Synthesized protease cleavage site
KTKK

SEQ ID NO: 488 - protein, 4 aa, Artificial Sequence
  Synthesized protease cleavage site
TKKR

SEQ ID NO: 489 - protein, 4 aa, Artificial Sequence
  Synthesized protease cleavage site
RRVR

SEQ ID NO: 490 - protein, 1474 aa, Homo sapiens
  Alpha-2-macroglobulin precursor (Alpha-2-M)
MGKNKLLHPSLVLLLLVLLPTDASVSGKPQYMVLVPSLLHTETTEKGCVLLSYLNETVTVSASLESVRGNRSLFTDLEAENDVLHCVAFAVPKSSSNEEVMFLTVQVKGPTQEFKKRTTVMVKNEDSLVFVQTDKSIYKPGQTVKFRVVSMDENFHPLNELIPLVYIQDPKGNRIAQWQSFQLEGGLKQFSFPLSSEPFQGSYKVVVQKKSGGRTEHPFTVEEFVLPKFEVQVTVPKIITILEEEMNVSVCGLYTYGKPVPGHVTVSICRKYSDASDCHGEDSQAFCEKFSGQLNSHGCFYQQVKTKVFQLKRKEYEMKLHTEAQIQEEGTVVELTGRQSSEITRTITKLSFVKVDSHFRQGIPFFGQVRLVDGKGVPIPNKVIFIRGNEANYYSNATTDEHGLVQFSINTTNVMGTSLTVRVNYKDRSPCYGYQWVSEEHEEAHHTAYLVFSPSKSFVHLEPMSHELPCGHTQTVQAHYILNGGTLLGLKKLSFYYLIMAKGGIVRTGTHGLLVKQEDMKGHFSISIPVKSDIAPVARLLIYAVLPTGDVIGDSAKYDVENCLANKVDLSFSPSQSLPASHAHLRVTAAPQSVCALRAVDQSVLLMKPDAELSASSVYNLLPEKDLTGFPGPLNDQDDEDCINRHNVYINGITYTPVSSTNEKDMYSFLEDMGLKAFTNSKIRKPKMCPQLQQYEMHGPEGLRVGFYESDVMGRGHARLVHVEEPHTETVRKYFPETWIWDLVVVNSAGVAEVGVTVPDTITEWKAGAFCLSEDAGLGISSTASLRAFQPFFVELTMPYSVIRGEAFTLKATVLNYLPKCIRVSVQLEASPAFLAVPVEKEQAPHCICANGRQTVSWAVTPKSLGNVNFTVSAEALESQELCGTEVPSVPEHGRKDTVIKPLLVEPEGLEKETTFNSLLCPSGGEVSEELSLKLPPNVVEESARASVSVLGDILGSAMQNTQNLLQMPYGCGEQNMVLFAPNIYVLDYLNETQQLTPEVKSKAIGYLNTGYQRQLNYKHYDGSYSTFGERYGRNQGNTWLTAFVLKTFAQARAYIFIDEAHITQALIWLSQRQKDNGCFRSSGSLLNNAIKGGVEDEVTLSAYITIALLEIPLTVTHPVVRNALFCLESAWKTAQEGDHGSHVYTKALLAYAFALAGNQDKRKEVLKSLNEEAVKKDNSVHWERPQKPKAPVGHFYEPQAPSAEVEMTSYVLLAYLTAQPAPTSEDLTSATNIVKWITKQQNAQGGFSSTQDTVVALHALSKYGAATFTRTGKAAQVTIQSSGTFSSKFQVDNNNRLLLQQVSLPELPGEYSMKVTGEGCVYLQTSLKYNILPEKEEFPFALGVQTLPQTCDEPKAHTSFQISLSVSYTGSRSASNMAIVDVKMVSGFIPLKPTVKMLERSNHVSRTEVSSNHVLIYLDKVSNQTLSLFFTVLQDVPVRDLKPAIVKVYDYYETDEFAIAEYNAPCSKDLGNA

SEQ ID NO: 491 - protein, 439 aa, Spodoptera litura nucleopolyhedrovirus
MCVLIPTFDASATTIVDCANLSDSSLRDLIYVNNVAVSKTGNYINRSVIMALNISGPVVSVNRVSMHIVHMYRSHIDRIFDRFNRLTYSATVTDGGDIDRVLKSDDYTVVCMSRSELLDNYKKCLINEMGATQDDVEKFRKYCLKPLVETENDGGVEDRKKPYVVICSLKPKLLNKNKTLCFTYKPQTGQVIVPLMHEINENGSDVYSYEVMAMIKDVRLSNKPLSMLERLKRSMDQIVLNHNENKYMMTNQLESLKYYLKSINSNEDDDLNKLMNVLNNLIDQLEKVLHKKSICDFSDDDEDDDGLIDMKYYNSIIEDNMRILLMKIQQYIDDRHMFLSPPLSVEKSTKIRLFENVMSFMKRFNLGELYSYLKKIIDWKTHENNQKLAWPEIVDDKYAFLKYDYFGTPHGFVYDQKDRTMYVKLHCGIAANRNIYIDI

SEQ ID NO: 492 - protein, 341 aa, Cowpox virus
MDIFREIASSMKGENVFISPPSISSVLTILYYGANGSTAEQLSKYVEKEADKNKDDISFKSMNKVYGRYSAVFKDSFLRKIGDNFQTVDFTDCRTVDAINKCVDIFTEGKINPLLDEPLSPDTCLLAISAVYFKAKWLMPFEKEFTSDYPFYVSPTEMVDVSMMSMYGEAFNHASVKESFGNFSIIELPYVGDTSMVVILPDNIDGLESIEQNLTDTNFKKWCDSMDAMFIDVHIPKFKVTGSYNLVDALVKLGLTEVFGSTGDYSNMCNSDVSVDAMIHKTYIDVNEEYTEAAAATCALVADCASTVTNEFCADHPFIYVIRHVDGKILFVGRYCSPTTN

SEQ ID NO: 493 - protein, 432 aa, Homo sapiens [sequence omitted]

SEQ ID NO: 494 - DNA, 9765 bp, Artificial Sequence
  pAcGP67b vector
aagctttactcgtaaagcgagttgaaggatcatatttagttgcgtttatgagataagattgaaagcacgtgtaaaatgtttcccgcgcgttggcacaactatttacaatgcggccaagttataaaagattctaatctgatatgttttaaaacacctttgcggcccgagttgtttgcgtacgtgactagcgaagaagatgtgtggaccgcagaacagatagtaaaacaaaaccctagtattggagcaataatcgatttaaccaacacgtctaaatattatgatggtgtgcattttttgcgggcgggcctgttatacaaaaaaattcaagtacctggccagactttgccgcctgaaagcatagttcaagaatttattgacacggtaaaagaatttacagaaaagtgtcccggcatgttggtgggcgtgcactgcacacacggtattaatcgcaccggttacatggtgtgcagatatttaatgcacaccctgggtattgcgccgcaggaagccatagatagattcgaaaaagccagaggtcacaaaattgaaagacaaaattacgttcaagatttattaatttaattaatattatttgcattctttaacaaatactttatcctattttcaaattgttgcgcttcttccagcgaaccaaaactatgcttcgcttgctccgtttagcttgtagccgatcagtggcgttgttccaatcgacggtaggattaggccggatattctccaccacaatgttggcaacgttgatgttacgtttatgcttttggttttccacgtacgtcttttggccggtaatagccgtaaacgtagtgccgtcgcgcgtcacgcacaacaccggatgtttgcgcttgtccgcggggtattgaaccgcgcgatccgacaaatccaccactttggcaactaaatcggtgacctgcgcgtcttttttctgcattatttcgtctttcttttgcatggtttcctggaagccggtgtacatgcggtttagatcagtcatgacgcgcgtgacctgcaaatctttggcctcgatctgcttgtccttgatggcaacgatgcgttcaataaactcttgttttttaacaagttcctcggttttttgcgccaccaccgcttgcagcgcgtttgtgtgctcggtgaatgtcgcaatcagcttagtcaccaactgtttgctctcctcctcccgttgtttgatcgcgggatcgtacttgccggtgcagagcacttgaggaattacttcttctaaaagccattcttgtaattctatggcgtaaggcaatttggacttcataatcagctgaatcacgccggatttagtaatgagcactgtatgcggctgcaaatacagcgggtcgccccttttcacgacgctgttagaggtagggcccccattttggatggtctgctcaaataacgatttgtatttattgtctacatgaacacgtatagctttatcacaaactgtatattttaaactgttagcgacgtccttggccacgaaccggacctgttggtcgcgctctagcacgtaccgcaggttgaacgtatcttctccaaatttaaattctccaattttaacgcgagccattttgatacacgtgtgtcgattttgcaacaactattgttttttaacgcaaactaaacttattgtggtaagcaataattaaatatgggggaacatgcgccgctacaacactcgtcgttatgaacgcagacggcgccggtctcggcgcaagcggctaaaacgtgttgcgcgttcaacgcggcaaacatcgcaaaagccaatagtacagttttgatttgcatattaacggcgattttttaaattatcttatttaataaatagttatgacgcctacaactccccgcccgcgttgactcgctgcacctcgagcagttcgttgacgccttcctccgtgtggccgaacacgtcgagcgggtggtcgatgaccagcggcgtgccgcacgcgacgcacaagtatctgtacaccgaatgatcgtcgggcgaaggcacgtcggcctccaagtggcaatattggcaaattcgaaaatatatacagttgggttgtttgcgcatatctatcgtggcgttgggcatgtacgtccgaacgttgatttgcatgcaagccgaaattaaatcattgcgattagtgcgattaaaacgttgtacatcctcgcttttaatcatgccgtcgattaaatcgcgcaatcgagtcaagtgatcaaagtgtggaataatgttttctttgtattcccgagtcaagcgcagcgcgtattttaacaaactagccatcttgtaagttagtttcatttaatgcaactttatccaataatatattatgtatcgcacgtcaagaattaacaatgcgcccgttgtcgcatctcaacacgactatgatagagatcaaataaagcgcgaattaaatagcttgcgacgcaacgtgcacgatctgtgcacgcgttccggcacgagctttgattgtaataagtttttacgaagcgatgacatgacccccgtagtgacaacgatcacgcccaaaagaactgccgactacaaaattaccgagtatgtcggtgacgttaaaactattaagccatccaatcgaccgttagtcgaatcaggaccgctggtgcgagaagccgcgaagtatggcgaatgcatcgtataacgtgtggagtccgctcattagagcgtcatgtttagacaagaaagctacatatttaattgatcccgatgattttattgataaattgaccctaactccatacacggtattctacaatggcggggttttggtcaaaatttccggactgcgattgtacatgctgttaacggctccgcccactattaatgaaattaaaaattccaattttaaaaaacgcagcaagagaaacatttgtatgaaagaatgcgtagaaggaaagaaaaatgtcgtcgacatgctgaacaacaagattaatatgcctccgtgtataaaaaaaatattgaacgatttgaaagaaaacaatgtaccgcgcggcggtatgtacaggaagaggtttatactaaactgttacattgcaaacgtggtttcgtgtgccaagtgtgaaaaccgatgtttaatcaaggctctgacgcatttctacaaccacgactccaagtgtgtgggtgaagtcatgcatcttttaatcaaatcccaagatgtgtataaaccaccaaactgccaaaaaatgaaaactgtcgacaagctctgtccgtttgctggcaactgcaagggtctcaatcctatttgtaattattgaataataaaacaattataaatgctaaatttgttttttattaacgatacaaaccaaacgcaacaagaacatttgtagtattatctataattgaaaacgcgtagttataatcgctgaggtaatatttaaaatcattttcaaatgattcacagttaatttgcgacaatataattttattttcacataaactagacgccttgtcgtcttcttcttcgtattccttctctttttcatttttctcctcataaaaattaacatagttattatcgtatccatatatgtatctatcgtatagagtaaattttttgttgtcataaatatatatgtcttttttaatggggtgtatagtaccgctgcgcatagtttttctgtaatttacaacagtgctattttctggtagttcttcggagtgtgttgctttaattattaaatttatataatcaatgaatttgggatcgtcggttttgtacaatatgttgccggcatagtacgcagcttcttctagttcaattacaccattttttagcagcaccggattaacataactttccaaaatgttgtacgaaccgttaaacaaaaacagttcacctcccttttctatactattgtctgcgagcagttgtttgttgttaaaaataacagccattgtaatgagacgcacaaactaatatcacaaactggaaatgtctatcaatatatagttgctgatatcatggagataattaaaatgataaccatctcgcaaataaataagtattttactgttttcgtaacagttttgtaataaaaaaacctataaatattccggattattcataccgtcccaccatcgggcgcggatctatgctactagtaaatcagtcacaccaaggcttcaataaggaacacacaagcaagatggtaagcgctattgttttatatgtgcttttggcggcggcggcgcattctgcctttgcggcggatcttggatcccgggccatgggaattccggagcggccgctgcagatctgatcctttcctgggacccggcaagaaccaaaaactcactctcttcaaggaaatccgtaatgttaaacccgacacgatgaagcttgtcgttggatggaaaggaaaagagttctacagggaaacttggacccgcttcatggaagacagcttccccattgttaacgaccaagaagtgatggatgttttccttgttgtcaacatgcgtcccactagacccaaccgttgttacaaattcctggcccaacacgctctgcgttgcgaccccgactatgtacctcatgacgtgattaggatcgtcgagccttcatgggtgggcagcaacaacgagtaccgcatcagcctggctaagaagggcggcggctgcccaataatgaaccttcactctgagtacaccaactcgttcgaacagttcatcgatcgtgtcatctgggagaacttctacaagcccatcgtttacatcggtaccgactctgctgaagaggaggaaattctccttgaagtttccctggtgttcaaagtaaaggagtttgcaccagacgcacctctgttcactggtccggcgtattaaaacacgatacattgttattagtacatttattaagcgctagattctgtgcgttgttgatttacagacaattgttgtacgtattttaataattcattaaatttataatctttagggtggtatgttagagcgaaaatcaaatgattttcagcgtctttatatctgaatttaaatattaaatcctcaatagatttgtaaaataggtttcgattagtttcaaacaagggttgtttttccgaaccgatggctggactatctaatggattttcgctcaacgccacaaaacttgccaaatcttgtagcagcaatctagctttgtcgatattcgtttgtgttttgttttgtaataaaggttcgacgtcgttcaaaatattatgcgcttttgtatttctttcatcactgtcgttagtgtacaattgactcgacgtaaacacgttaaataaagcttggacatatttaacatcgggcgtgttagctttattaggccgattatcgtcgtcgtcccaaccctcgtcgttagaagttgcttccgaagacgattttgccatagccacacgacgcctattaattgtgtcggctaacacgtccgcgatcaaatttgtagttgagctttttggaattatttctgattgcgggcgtttttgggcgggtttcaatctaactgtgcccgattttaattcagacaacacgttagaaagcgatggtgcaggcggtggtaacatttcagacggcaaatctactaatggcggcggtggtggagctgatgataaatctaccatcggtggaggcgcaggcggggctggcggcggaggcggaggcggaggtggtggcggtgatgcagacggcggtttaggctcaaatgtctctttaggcaacacagtcggcacctcaactattgtactggtttcgggcgccgtttttggtttgaccggtctgagacgagtgcgatttttttcgtttctaatagcttccaacaattgttgtctgtcgtctaaaggtgcagcgggttgaggttccgtcggcattggtggagcgggcggcaattcagacatcgatggtggtggtggtggtggaggcgctggaatgttaggcacgggagaaggtggtggcggcggtgccgccggtataatttgttctggtttagtttgttcgcgcacgattgtgggcaccggcgcaggcgccgctggctgcacaacggaaggtcgtctgcttcgaggcagcgcttggggtggtggcaattcaatattataattggaatacaaatcgtaaaaatctgctataagcattgtaatttcgctatcgtttaccgtgccgatatttaacaaccgctcaatgtaagcaattgtattgtaaagagattgtctcaagctccgcacgccgataacaagccttttcatttttactacagcattgtagtggcgagacacttcgctgtcgtcgacgtacatgtatgctttgttgtcaaaaacgtcgttggcaagctttaaaatatttaaaagaacatctctgttcagcaccactgtgttgtcgtaaatgttgtttttgataatttgcgcttccgcagtatcgacacgttcaaaaaattgatgcgcatcaattttgttgttcctattattgaataaataagattgtacagattcatatctacgattcgtcatggccaccacaaatgctacgctgcaaacgctggtacaattttacgaaaactgcaaaaacgtcaaaactcggtataaaataatcaacgggcgctttggcaaaatatctattttatcgcacaagcccactagcaaattgtatttgcagaaaacaatttcggcgcacaattttaacgctgacgaaataaaagttcaccagttaatgagcgaccacccaaattttataaaaatctattttaatcacggttccatcaacaaccaagtgatcgtgatggactacattgactgtcccgatttatttgaaacactacaaattaaaggcgagctttcgtaccaacttgttagcaatattattagacagctgtgtgaagcgctcaacgatttgcacaagcacaatttcatacacaacgacataaaactcgaaaatgtcttatatttcgaagcacttgatcgcgtgtatgtttgcgattacggattgtgcaaacacgaaaactcacttagcgtgcacgacggcacgttggagtattttagtccggaaaaaattcgacacacaactatgcacgtttcgtttgactggtacgcggcgtgttaacatacaagttgctaaccggcggttcgtaatcatggtcatagctgtttcctgtgtgaaattgttatccgctcacaattccacacaacatacgagccggaagcataaagtgtaaagcctggggtgcctaatgagtgagctaactcacattaattgcgttgcgctcactgcccgctttccagtcgggaaacctgtcgtgccagctgcattaatgaatcggccaacgcgcggggagaggcggtttgcgtattgggcgctcttccgcttcctcgctcactgactcgctgcgctcggtcgttcggctgcggcgagcggtatcagctcactcaaaggcggtaatacggttatccacagaatcaggggataacgcaggaaagaacatgtgagcaaaaggccagcaaaaggccaggaaccgtaaaaaggccgcgttgctggcgtttttccataggctccgcccccctgacgagcatcacaaaaatcgacgctcaagtcagaggtggcgaaacccgacaggactataaagataccaggcgtttccccctggaagctccctcgtgcgctctcctgttccgaccctgccgcttaccggatacctgtccgcctttctcccttcgggaagcgtggcgctttctcatagctcacgctgtaggtatctcagttcggtgtaggtcgttcgctccaagctgggctgtgtgcacgaaccccccgttcagcccgaccgctgcgccttatccggtaactatcgtcttgagtccaacccggtaagacacgacttatcgccactggcagcagccactggtaacaggattagcagagcgaggtatgtaggcggtgctacagagttcttgaagtggtggcctaactacggctacactagaaggacagtatttggtatctgcgctctgctgaagccagttaccttcggaaaaagagttggtagctcttgatccggcaaacaaaccaccgctggtagcggtggtttttttgtttgcaagcagcagattacgcgcagaaaaaaaggatctcaagaagatcctttgatcttttctacggggtctgacgctcagtggaacgaaaactcacgttaagggattttggtcatgagattatcaaaaaggatcttcacctagatccttttaaattaaaaatgaagttttaaatcaatctaaagtatatatgagtaaacttggtctgacagttaccaatgcttaatcagtgaggcacctatctcagcgatctgtctatttcgttcatccatagttgcctgactccccgtcgtgtagataactacgatacgggagggcttaccatctggccccagtgctgcaatgataccgcgagacccacgctcaccggctccagatttatcagcaataaaccagccagccggaagggccgagcgcagaagtggtcctgcaactttatccgcctccatccagtctattaattgttgccgggaagctagagtaagtagttcgccagttaatagtttgcgcaacgttgttgccattgctacaggcatcgtggtgtcacgctcgtcgtttggtatggcttcattcagctccggttcccaacgatcaaggcgagttacatgatcccccatgttgtgcaaaaaagcggttagctccttcggtcctccgatcgttgtcagaagtaagttggccgcagtgttatcactcatggttatggcagcactgcataattctcttactgtcatgccatccgtaagatgcttttctgtgactggtgagtactcaaccaagtcattctgagaatagtgtatgcggcgaccgagttgctcttgcccggcgtcaatacgggataataccgcgccacatagcagaactttaaaagtgctcatcattggaaaacgttcttcggggcgaaaactctcaaggatcttaccgctgttgagatccagttcgatgtaacccactcgtgcacccaactgatcttcagcatcttttactttcaccagcgtttctgggtgagcaaaaacaggaaggcaaaatgccgcaaaaaagggaataagggcgacacggaaatgttgaatactcatactcttcctttttcaatattattgaagcatttatcagggttattgtctcatgagcggatacatatttgaatgtatttagaaaaataaacaaataggggttccgcgcacatttccccgaaaagtgccacctgacgtctaagaaaccattattatcatgacattaacctataaaaataggcgtatcacgaggccctttcgtctcgcgcgtttcggtgatgacggtgaaaacctctgacacatgcagctcccggagacggtcacagcttgtctgtaagcggatgccgggagcagacaagcccgtcagggcgcgtcagcgggtgttggcgggtgtcggggctggcttaactatgcggcatcagagcagattgtactgagagtgcaccatatgcggtgtgaaataccgcacagatgcgtaaggagaaaataccgcatcaggcgccattcgccattcaggctgcgcaactgttgggaagggcgatcggtgcgggcctcttcgctattacgccagctggcgaaagggggatgtgctgcaaggcgattaagttgggtaacgccagggttttcccagtcacgacgttgtaaaacgacggccagtgcc

SEQ ID NO: 495 - protein, 8 aa, Artificial Sequence
  FLAG tag
DYKDDDDK

SEQ ID NO: 496 - protein, 6 aa, Artificial Sequence
  6xHis tag
HHHHHH

SEQ ID NO: 497 - protein, 432 aa, Homo sapiens
  Mutant AT3 sequence; AT3/RRVRKE
HGSPVDICTAKPRDIPMNPMCIYRSPEKKATEDEGSEQKIPEATNRRVWELSKANSRFATTFYQHLADSKNDNDNIFLSPLSISTAFAMTKLGACNDTLQQLMEVFKFDTISEKTSDQIHFFFAKLNCRLYRKANKSSKLVSANRLFGDKSLTFNETYQDISELVYGAKLQPLDFKENAEQSRAAINKWVSNKTEGRITDVIPSEAINELTVLVLVNTIYFKGLWKSKFSPENTRKELFYKADGESCSASMMYQEGKFRYRRVAEGTQVLELPFKGDDITMVLILPKPEKSLAKVEKELTPEVLQEWLDELEEMMLVVHMPRFRIEDGFSLKEQLQDMGLVDLFSPEKSKLPGIVAEGRDDLYVSDAFHKAFLEVNEEGSEAAASTAVVRRVRKENPNRVTFKANRPFLVFIREVPLNTIIFMGRVANPCVK

SEQ ID NO: 498 - protein, 6 aa, Artificial Sequence
  replacement cleavage site RRVRKE
RRVRKE

SEQ ID NO: 499 - protein, 432 aa, Homo sapiens
  Mutant AT3 sequence; AT3/SLGRKI
HGSPVDICTAKPRDIPMNPMCIYRSPEKKATEDEGSEQKIPEATNRRVWELSKANSRFATTFYQHLADSKNDNDNIFLSPLSISTAFAMTKLGACNDTLQQLMEVFKFDTISEKTSDQIHFFFAKLNCRLYRKANKSSKLVSANRLFGDKSLTFNETYQDISELVYGAKLQPLDFKENAEQSRAAINKWVSNKTEGRITDVIPSEAINELTVLVLVNTIYFKGLWKSKFSPENTRKELFYKADGESCSASMMYQEGKFRYRRVAEGTQVLELPFKGDDITMVLILPKPEKSLAKVEKELTPEVLQEWLDELEEMMLVVHMPRFRIEDGFSLKEQLQDMGLVDLFSPEKSKLPGIVAEGRDDLYVSDAFHKAFLEVNEEGSEAAASTAVVSLGRKINPNRVTFKANRPFLVFIREVPLNTIIFMGRVANPCVK

SEQ ID NO: 500 - protein, 432 aa, Homo sapiens
  Mutant AT3 sequence; SKGRSL
HGSPVDICTAKPRDIPMNPMCIYRSPEKKATEDEGSEQKIPEATNRRVWELSKANSRFATTFYQHLADSKNDNDNIFLSPLSISTAFAMTKLGACNDTLQQLMEVFKFDTISEKTSDQIHFFFAKLNCRLYRKANKSSKLVSANRLFGDKSLTFNETYQDISELVYGAKLQPLDFKENAEQSRAAINKWVSNKTEGRITDVIPSEAINELTVLVLVNTIYFKGLWKSKFSPENTRKELFYKADGESCSASMMYQEGKFRYRRVAEGTQVLELPFKGDDITMVLILPKPEKSLAKVEKELTPEVLQEWLDELEEMMLVVHMPRFRIEDGFSLKEQLQDMGLVDLFSPEKSKLPGIVAEGRDDLYVSDAFHKAFLEVNEEGSEAAASTAVVSKGRSLNPNRVTFKANRPFLVFIREVPLNTIIFMGRVANPCVK

SEQ ID NO: 501 - protein, 6 aa, Artificial Sequence
  replacement cleavage site SKGRSL
SKGRSL

SEQ ID NO: 502 - protein, 432 aa, Homo sapiens
  Mutant AT3 sequence; AT3/PRFKII
HGSPVDICTAKPRDIPMNPMCIYRSPEKKATEDEGSEQKIPEATNRRVWELSKANSRFATTFYQHLADSKNDNDNIFLSPLSISTAFAMTKLGACNDTLQQLMEVFKFDTISEKTSDQIHFFFAKLNCRLYRKANKSSKLVSANRLFGDKSLTFNETYQDISELVYGAKLQPLDFKENAEQSRAAINKWVSNKTEGRITDVIPSEAINELTVLVLVNTIYFKGLWKSKFSPENTRKELFYKADGESCSASMMYQEGKFRYRRVAEGTQVLELPFKGDDITMVLILPKPEKSLAKVEKELTPEVLQEWLDELEEMMLVVHMPRFRIEDGFSLKEQLQDMGLVDLFSPEKSKLPGIVAEGRDDLYVSDAFHKAFLEVNEEGSEAAASTAVVPRFKIINPNRVTFKANRPFLVFIREVPLNTIIFMGRVANPCVK

SEQ ID NO: 503 - protein, 6 aa, Artificial Sequence
  replacement cleavage site PRFKII
PRFKII

SEQ ID NO: 504 - DNA, 723 bp, Homo sapiens
  MT-SP1 protease domain
gttgttgggggcacggatgcggatgagggcgagtggccctggcaggtaagcctgcatgctctgggccagggccacatctgcggtgcttccctcatctctcccaactggctggtctctgccgcacactgctacatcgatgacagaggattcaggtactcagaccccacgcagtggacggccttcctgggcttgcacgaccagagccagcgcagcgcccctggggtgcaggagcgcaggctcaagcgcatcatctcccaccccttcttcaatgacttcaccttcgactatgacatcgcgctgctggagctggagaaaccggcagagtacagctccatggtgcggcccatctgcctgccggacgcctcccatgtcttccctgccggcaaggccatctgggtcacgggctggggacacacccagtatggaggcactggcgcgctgatcctgcaaaagggtgagatccgcgtcatcaaccagaccacctgcgagaacctcctgccgcagcagatcacgccgcgcatgatgtgcgtgggcttcctcagcggcggcgtggactcctgccagggtgattccgggggacccctgtccagcgtggaggcggatgggcggatcttccaggccggtgtggtgagctggggagacggctgcgctcagaggaacaagccaggcgtgtacacaaggctccctctgtttcgggactggatcaaagagaacactggggta

SEQ ID NO: 505 - protein, 241 aa, Homo sapiens [sequence omitted]

SEQ ID NO: 506 - protein, 444 aa, Homo sapiens [sequence omitted]

SEQ ID NO: 507 - protein, 241 aa, Homo sapiens [sequence omitted]

SEQ ID NO: 508 - DNA, 44 bp, Artificial Sequence
  MT-SP1 forward primer
gcgcagatatcgtaccgcatatgaaaaagaatatcgcatttctt

SEQ ID NO: 509 - DNA, 43 bp, Artificial Sequence
  MT-SP1 reverse  primer
gtgcatgctgactgactgagctcccgcttaccccagtgttctc

SEQ ID NO: 510 - DNA, 1335 bp, Homo sapiens
  MT-SP1 protease domain fusion; STII/MT-SP1/GeneIII
atgaaaaagaatatcgcatttcttcttgcatctatgttcgttttttctattgctacaaatgcctatgcagttgttgggggcacggatgcggatgagggcgagtggccctggcaggtaagcctgcatgctctgggccagggccacatctgcggtgcttccctcatctctcccaactggctggtctctgccgcacactgctacatcgatgacagaggattcaggtactcagaccccacgcagtggacggccttcctgggcttgcacgaccagagccagcgcagcgcccctggggtgcaggagcgcaggctcaagcgcatcatctcccaccccttcttcaatgacttcaccttcgactatgacatcgcgctgctggagctggagaaaccggcagagtacagctccatggtgcggcccatctgcctgccggacgcctcccatgtcttccctgccggcaaggccatctgggtcacgggctggggacacacccagtatggaggcactggcgcgctgatcctgcaaaagggtgagatccgcgtcatcaaccagaccacctgcgagaacctcctgccgcagcagatcacgccgcgcatgatgtgcgtgggcttcctcagcggcggcgtggactcctgccagggtgattccgggggacccctgtccagcgtggaggcggatgggcggatcttccaggccggtgtggtgagctggggagacggctgcgctcagaggaacaagccaggcgtgtacacaaggctccctctgtttcgggactggatcaaagagaacactggggtaagcgggagctccggtggtggctctgagggtggcggttctgagggtggcggctctgagggaggcggttccggtggtggctctggttccggtgattttgattatgaaaagatggcaaacgctaataagggggctatgaccgaaaatgccgatgaaaacgcgctacagtctgacgctaaaggcaaacttgattctgtcgctactgattacggtgctgctatcgatggtttcattggtgacgtttccggccttgctaatggtaatggtgctactggtgattttgctggctctaattcccaaatggctcaagtcggtgacggtgataattcacctttaatgaataatttccgtcaatatttaccttccctccctcaatcggttgaatgtcgcccttttgtctttagcgctggtaaaccatatgaattttctattgattgtgacaaaataaacttattccgtggtgtctttgcgtttcttttatatgttgccacctttatgtatgtattttctacgtttgctaacatactgcgtaataaggagtcttaa

SEQ ID NO: 511 - protein, 23 aa, Escherichia coli
  STII leader sequence
MKKNIAFLLASMFVFSIATNAYA

SEQ ID NO: 512 - protein, 180 aa, M13 phage
  GeneIII
SGSSGGGSEGGGSEGGGSEGGGSGGGSGSGDFDYEKMANANKGAMTENADENALQSDAKGKLDSVATDYGAAIDGFIGDVSGLANGNGATGDFAGSNSQMAQVGDGDNSPLMNNFRQYLPSLPQSVECRPFVFSAGKPYEFSIDCDKINLFRGVFAFLLYVATFMYVFSTFANILRNKES

SEQ ID NO: 513 - protein, 4 aa, Artificial Sequence
  Synthesized protease cleavage site RQAR
RQAR

SEQ ID NO: 514 - protein, 4 aa, Artificial Sequence
  Synthesized protease cleavage site SLGR
SLGR

SEQ ID NO: 515 - protein, 855 aa, Homo sapiens
  Mutant MT-SP1 full length; CB469
MGSDRARKGGGGPKDFGAGLKYNSRHEKVNGLEEGVEFLPVNNVKKVEKHGPGRWVVLAAVLIGLLLVLLGIGFLVWHLQYRDVRVQKVFNGYMRITNENFVDAYENSNSTEFVSLASKVKDALKLLYSGVPFLGPYHKESAVTAFSEGSVIAYYWSEFSIPQHLVEEAERVMAEERVVMLPPRARSLKSFVVTSVVAFPTDSKTVQRTQDNSCSFGLHARGVELMRFTTPGFPDSPYPAHARCQWALRGDADSVLSLTFRSFDLASCDERGSDLVTVYNTLSPMEPHALVQLCGTYPPSYNLTFHSSQNVLLITLITNTERRHPGFEATFFQLPRMSSCGGRLRKAQGTFNSPYYPGHYPPNIDCTWNIEVPNNQHVKVRFKFFYLLEPGVPAGTCPKDYVEINGEKYCGERSQFVVTSNSNKITVRFHSDQSYTDTGFLAEYLSYDSSDPCPGQFTCRTGRCIRKELRCDGWADCTDHSDELNCSCDAGHQFTCKNKFCKPLFWVCDSVNDCGDNSDEQGCSCPAQTFRCSNGKCLSKSQQCNGKDDCGDGSDEASCPKVNVVTCTKHTYRCLNGLCLSKGNPECDGKEDCSDGSDEKDCDCGLRSFTRQARVVGGTDADEGEWPWQVSLHALGQGHICGASLISPNWLVSAAHCYIDDRGFRYSDPTQWTAFLGLHDQSQRSAPGVQERRLKRIISHPFFNDFTFDYDIALLELEKPAEYSSMVRPISLPDASHVFPAGKAIWVTGWGHTQYGGTGALILQKGEIRVINQTTCENLLPQQITPRMMCVGFLSGGVDSCQGDSGGPLSSVEADGRIFQAGVVSWGDGCAQRNKPGVYTRLPLFRDWIKENTGV

SEQ ID NO: 516 - protein, 241 aa, Homo sapiens
  Mutant MTSP-1 protease domain; CPC-0019595
VVGGTDADEGEWPWQVSLHALGQGHICGASLISPNWLVSAAHCYIDDRGFRYSDPTQWTAFLGLHDQSQRSAPGVQERRLKRIISHPFFNDFTFDYDIALLELEKPAEYSSMVRPISLPDASHVFPAGKATWVTGWGHTQYGGTGALILQKGEIRVIDQATCENLLPQQITPRMMCVGLLSGGVDSCQGDSGGPLSSVEADGRIFQAGVVSWGVGCAQRNKPGVYTRLPLFRDWIKENTGV

SEQ ID NO: 517 - protein, 241 aa, Homo sapiens
  Mutant MT-SP1 protease domain; CPC-0023085
VVGGTDADEGEWPWQVSLHALGQGHFCGASLISPNWLVSAAHCYIDDRGFRYSDPTQWTAFLGLHDQSQRSAPGVQERRLKRIISHPFFNDFTFDYDIALLELEKPAEYSSMVRPISLPDASHVFPAGKAIWVTGWGHTQYGGTGALILQKGEIRVINQTTCENLLPQQITPRMMCVGFLSGGVDSCQGDSGGPLSSVEADGRIFQAGVVSWGDGCAQRNKPGVYTRLPLFRDWIKENTGV

SEQ ID NO: 518 - protein, 241 aa, Homo sapiens
  Mutant MT-SP1 protease domain; CPC-0024153
VVGGTDADEGEWPWQVSLHALGQGHFCGASLISPNWLVSAAHCYIDDRGFRYSDPTQWTAFLGLHDQSQRSAPGVQERRLKRIISHPFFNDFTFDYDIALLELEKPAEYSSMVRPISLPDTSHVFPAGKAIWVTGWGHTQYGGTGALILQKGEIRVINQTTCENLLPQQITPRMMCVGFLSGGVDSCQGDSGGPLSSVEADGRIFQAGVVSWGDGCAQRNKPGVYTRLPLFRDWIKENTGG

SEQ ID NO: 519 - protein, 241 aa, Homo sapiens
  Mutant MT-SP1 protease domain; CPC-0025366
VVGGTDAEEGEWPWQVSLHALGQGHFCGASLISPNWLVSAAHCYIDDRGFRYSDPTQWTAFLGLHDQSQRSAPGVQERRLKRIISHPFFNDFPFDYDIALLELEKPAEYSSMVRPISLPDASHVFPAGKAIWVTGWGHIQYGGTGALILQKGEIRVINQTTCENLLPQQITPRMMCVGFLSGGVDSCQGDSGGPLSSVEADGRIFQAGVVSWGDGCAQRNKPGVYTRLPLFRDWIKENTGV

SEQ ID NO: 520 - protein, 241 aa, Homo sapiens; identical to SEQ ID NO: 517
  Mutant MT-SP1 protease domain; CPC-0025387

SEQ ID NO: 521 - protein, 241 aa, Homo sapiens
  Mutant MT-SP1 protease domain; CPC-0025582
VVGGTDADEGEWPWQVSLHALGQGHFCGASLISPNWLVSAAHCYIDDRGFRYSDPTQWTAFLGLHDQSQRSAPGVQERRLKRIISHPFFNDFTFDYDIALLELEKPAEYSSMVRPISLPDASHVFPAGKAIWVTGWGHTQYGGTGALILQKGEIRVINQTTCENFLPQQITPRMMCVGFLSGGVDSCQGDSGGPLSSVEADGRIFQAGVVSWGDGCAQRNKPGVYTRLPLFRDWIKENTGG

SEQ ID NO: 522 - protein, 241 aa, Homo sapiens
  Mutant MT-SP-1 protease domain; CPC-0025720
VVGGTDADEGEWPWQVSLHALGQGHICGASLISPNWLVSAAHCYIDDRGFRYSDPTQWTAFLGLHDQSQRSAPGVQERRLKRIISHPFFNDFTFDYDIALLELEKPAEYSSMVRPISLPDASHVFPAGKAIWVTGWGRTQYGGTGALILQKGEIRVINQTTCENLLPQRITPRMMCVGFLSGGVDSCQGDSGGPLSSVEADGRIFQAGVVSWGDGCAQRNKPGVYTRLPLFRDWIKENTGV

SEQ ID NO: 523 - protein, 241 aa, Homo sapiens
  Mutant MT-SP1 protease domain; CPC-0025876
VVGGTDADEGEWPWQVSLHALGQGHFCGASLISPNWLVSAAHCYIDDRGFRYSDPTQWTAFLGLHDQSQRSAPGVQERRLKRIISHPFFNDFTFDYDIALLELEKPAEYSSMVRPISLPDASHVFPAGKAIWVTGWGHTQYGGTGALILQKGEIRVINQTTCENFLPQQITPRMMCVGFLSGGVDSCQGDSGGPLSSVEADGRIFQAGVVSWGDGCAQRNKPGVYTRLPLFRDWIKENTGV

SEQ ID NO: 524 - protein, 241 aa, Homo sapiens [sequence omitted]

SEQ ID NO: 525 - protein, 241 aa, Homo sapiens
  Mutant MT-SP1 protease domain; CPC-0026100
VVGGTDADEGEWPWQVSLHALGQGHFCGASLISPNWLVSAAHCYIDDRGFRYSDPTQWTAFLGLHDQSQRSAPGVQERRLKRIISHPFFNDFTFDYDIALLELEKPAEYSSMVRPISLPDASHVFPAGKAIWVTGWGHTQYGGTGALVLQKGEIRVINQTTCENLLPQQITPRMMCVGFLSGGVDSCQGDSGGPLSSVEADGRIFQAGVVSWGDGCAQRNKPGVYTRLPLFRDWIKENTGG

SEQ ID NO: 526 - protein, 241 aa, Homo sapiens
  Mutant MT-SP1 protease domain; CPC-0026323
VVGGTDADEGEWPWQVSLHALGQGHFCGASLISPNWMVSAAHCYIDDRGFRYSDPTQWTAFLGLHDQSQRSAPGVQERRLKRIISHPFFNDFTFDYDIALLELEKPAEYSSMVRPISLPDASHDFPAGKAIWVTGWGHTQYGGTGALILQKGEIRVINQTTCENLLPQQITPRMMCVGFLSGGVDSCQGDSGGPLSSVEADGRIFQAGVVSWGDGCALRNKPGVYTRLPLFRDWIKENTGV

SEQ ID NO: 527 - protein, 241 aa, Homo sapiens
  Mutant MT-SP1 protease domain; CPC-0027399
VVGGTDADEGEWPWQVSLHALGQGHICGASLISPNWLVSAAHCYIDDRGFRYSDPTQWTAFLGLHDQSQRSAPGVQERRLKRIISHPFFNDFTLDYDIALLELEKPAEYSSMVRPISLPDASHVFPAGKAIWVTGWGHTQYGGTGALILQKGEIRVINQTTCENLLPQQITPRMMCVGFLSGGVDSCQGDSGGPLSSVEADGRIFQAGVVSWGDGCAQRNKPGVYTRLPLFRDWIKENTGV

SEQ ID NO: 528 - protein, 241 aa, Homo sapiens
  Mutant MT-SP1 protease domain; CPC-0027706
VVGGTDADEGEWPWQVSLHALGQGHICGASLISPNWLVSAAHCYIDDRGFRYSDPTQWTAFLGLHDQSQRSAPGVQERRLKRIISHPFFNDYTFDYDIALLELEKPAEYSSMVRPISLPDASHVFPAGKAVWVTGWGHTQYGGTGALILQKGEIRVINQTTCENLLPQQITPRMMCVGFLSGGVDSCHGDSGGPLSIVEADGRIFQAGVVSWGDGCAQRNKPGVYTRLPLFRDWIKENTGV

SEQ ID NO: 529 - protein, 241 aa, Homo sapiens
  Mutant MT-SP1 protease domain; CPC-0027797
VVGGTDADEGEWPWQVSLHALGQGHICGASLISPNWLVSAAHCYIDDRGFRYSDPTQWTAFLGLRDQSQRSAPGVQERRLKRIISHPFFNDFTFDYDIALLELEKPAEYSSMVRPISLPDASHVFSAGKAIWVTGWGHTQYGGTGALILQKGEIRVINQTTCENLLPQQITPRMMCVGFLSGGVDSCQGDSGGPLSSVEADGRIFQAGVVSWGVGCAQRNKPGVYTRLPLFRDWIKENTGV

SEQ ID NO: 530 - protein, 241 aa, Homo sapiens
  Mutant MT-SP1 protease domain; CPC-0028017
VVGGTDADEGEWPWQVSLHALGQGHICGASLISPNWLVSAAHCYIDDRGFRYSDPTQWTAFLGLHDQSQRSAPGVQERRLKRIISHPFFNDFTFDYDIALLELEKPAEYSSMVRPISLPDASHVFPAGKAIWVTGWGHTQYGGTGALILQKGEIRVINQTTCENLLPQQITPRMMCVGFLSGGVDSCQGDSGGPLSSVEADGRIFQAGVVSWGVGCAQRNKPGVYTRLPLFRDWIKENTGV

SEQ ID NO: 531 - protein, 241 aa, Homo sapiens
  Mutant MT-SP1 protease domain; CPC-0028333
VVGGTDADEGEWPWQVSLHALGQGHICGASLISPNWLVSAAHCYIDDRGFRYSDPTQWKAFLGLHDQSQRSAPGVQERRLKRIISHPLFNDYTFDYDIALLELEKPAEYSSMVRPISLPDASHVFPAGKAIWVTGWGHTQYGGTGALILQKGEIRVINQTTCENLLPQQITPRMMCVGFLSGGVDSCQGDSGGPLSSVEADGRIFQAGVVSWGVGCAQRNKPGVYTRLPLFRDWIKENTGV

SEQ ID NO: 532 - protein, 241 aa, Homo sapiens
  Mutant MT-SP1 protease domain; CPC-0028341
VVGGTDADEGEWPWQVSLHALGQGHTCGASLISPNWLVSAAHCYIDDRGFRYSDPTQWTAFLGLHDQSQRSAPGVQERRLKRIISHPFFNDFTFDYDIALLELEKPAEYSSMVRPISLPDASHVFPAGKAIWVTGWGHTQYGGTGALILQKGEIRVINQTTCENLLSQQITPRMMCVGFLSGGVDSCQGDSGGPLSSVEADGRIFLAGVVSWGDGCAQRNKPGVYTRLPLFRDWIKENTGV

SEQ ID NO: 533 - protein, 241 aa, Homo sapiens
  Mutant MT-SP1 protease domain; CPC-0033634
VVGGTDADEGEWPWQVSLHALGQGHICGASLISPNWLVSAAHCYIDDRGFRYSDPTQWTAFLGLHDQSQRSAPGVQERRLKRIISHPLFNDFTFDYDIALLELEKPAEYSSMVRPISLPDASHVFPAGKAIWVTGWGHTQYGGTGALILQKGEIRVINQTTCENLLPQQITPRMMCVGFLSGGVDSCQGDSGGPLSSVEADGRIFQAGVVSWGDGCAQRNKPGVYTRLPLLRDWIKENTGV

SEQ ID NO: 534 - protein, 241 aa, Homo sapiens [sequence omitted]

SEQ ID NO: 535 - protein, 241 aa, Homo sapiens
  Mutant MT-SP1 protease domain; CPC-0027484
VVGGTDADEGEWPWQVSLHALGQGHICGASLISPNWLVSAAHCYIDDRGFRYSDPTQWTAFLGLHDQSQRSAPGVQERRLKRIISHPFFKDFTFDYDIALLELEKPAEYSSMVRPISLPDASHVFPAGKAIWVTGWGHTQYGGTGALILQKGEIRVINQTTCENLLPQQITPRMMCVGFLSGGVDSCQGDSGGPLSSVEADGRIFQAGVVSWGDGCAQRNKPGVYTRLPLFRDWIKENTGV

SEQ ID NO: 536 - protein, 241 aa, Homo sapiens
  Mutant MT-SP1 protease domain; CPC-0028993
VVGGTDADEGEWPWQVSLHALGQGHICGASLISPNWLVSAAHCYIDDRGFRSSDPTQWTAFLGLHDQSQRSAPGVQERRLKRIISHPFFNDFTFDYDIALLELEKPAEYSSMVRPISLPDASHVFPAGKAIWVTGWGHTQYGGTGALILQKGEIRVINQTTCENLLPQRITPRMMCVGFLSGGVDSCQGDSGGPLSSVEADGRIFQAGVVSWGDGCAQRNKPGVYTRLPLFRDWIKENTGV

SEQ ID NO: 537 - protein, 855 aa, Homo sapiens
  Mutant MT-SP1 full length; CPC-0019595
MGSDRARKGGGGPKDFGAGLKYNSRHEKVNGLEEGVEFLPVNNVKKVEKHGPGRWVVLAAVLIGLLLVLLGIGFLVWHLQYRDVRVQKVFNGYMRITNENFVDAYENSNSTEFVSLASKVKDALKLLYSGVPFLGPYHKESAVTAFSEGSVIAYYWSEFSIPQHLVEEAERVMAEERVVMLPPRARSLKSFVVTSVVAFPTDSKTVQRTQDNSCSFGLHARGVELMRFTTPGFPDSPYPAHARCQWALRGDADSVLSLTFRSFDLASCDERGSDLVTVYNTLSPMEPHALVQLCGTYPPSYNLTFHSSQNVLLITLITNTERRHPGFEATFFQLPRMSSCGGRLRKAQGTFNSPYYPGHYPPNIDCTWNIEVPNNQHVKVRFKFFYLLEPGVPAGTCPKDYVEINGEKYCGERSQFVVTSNSNKITVRFHSDQSYTDTGFLAEYLSYDSSDPCPGQFTCRTGRCIRKELRCDGWADCTDHSDELNCSCDAGHQFTCKNKFCKPLFWVCDSVNDCGDNSDEQGCSCPAQTFRCSNGKCLSKSQQCNGKDDCGDGSDEASCPKVNVVTCTKHTYRCLNGLCLSKGNPECDGKEDCSDGSDEKDCDCGLRSFTRQARVVGGTDADEGEWPWQVSLHALGQGHICGASLISPNWLVSAAHCYIDDRGFRYSDPTQWTAFLGLHDQSQRSAPGVQERRLKRIISHPFFNDFTFDYDIALLELEKPAEYSSMVRPISLPDASHVFPAGKATWVTGWGHTQYGGTGALILQKGEIRVIDQATCENLLPQQITPRMMCVGLLSGGVDSCQGDSGGPLSSVEADGRIFQAGVVSWGVGCAQRNKPGVYTRLPLFRDWIKENTGV

SEQ ID NO: 538 - protein, 855 aa, Homo sapiens
  Mutant MT-SP1 full length; CPC-0023085
MGSDRARKGGGGPKDFGAGLKYNSRHEKVNGLEEGVEFLPVNNVKKVEKHGPGRWVVLAAVLIGLLLVLLGIGFLVWHLQYRDVRVQKVFNGYMRITNENFVDAYENSNSTEFVSLASKVKDALKLLYSGVPFLGPYHKESAVTAFSEGSVIAYYWSEFSIPQHLVEEAERVMAEERVVMLPPRARSLKSFVVTSVVAFPTDSKTVQRTQDNSCSFGLHARGVELMRFTTPGFPDSPYPAHARCQWALRGDADSVLSLTFRSFDLASCDERGSDLVTVYNTLSPMEPHALVQLCGTYPPSYNLTFHSSQNVLLITLITNTERRHPGFEATFFQLPRMSSCGGRLRKAQGTFNSPYYPGHYPPNIDCTWNIEVPNNQHVKVRFKFFYLLEPGVPAGTCPKDYVEINGEKYCGERSQFVVTSNSNKITVRFHSDQSYTDTGFLAEYLSYDSSDPCPGQFTCRTGRCIRKELRCDGWADCTDHSDELNCSCDAGHQFTCKNKFCKPLFWVCDSVNDCGDNSDEQGCSCPAQTFRCSNGKCLSKSQQCNGKDDCGDGSDEASCPKVNVVTCTKHTYRCLNGLCLSKGNPECDGKEDCSDGSDEKDCDCGLRSFTRQARVVGGTDADEGEWPWQVSLHALGQGHFCGASLISPNWLVSAAHCYIDDRGFRYSDPTQWTAFLGLHDQSQRSAPGVQERRLKRIISHPFFNDFTFDYDIALLELEKPAEYSSMVRPISLPDASHVFPAGKAIWVTGWGHTQYGGTGALILQKGEIRVINQTTCENLLPQQITPRMMCVGFLSGGVDSCQGDSGGPLSSVEADGRIFQAGVVSWGDGCAQRNKPGVYTRLPLFRDWIKENTGV

SEQ ID NO: 539 - protein, 855 aa, Homo sapiens
  Mutant MT-SP1 full length; CPC-0024153
MGSDRARKGGGGPKDFGAGLKYNSRHEKVNGLEEGVEFLPVNNVKKVEKHGPGRWVVLAAVLIGLLLVLLGIGFLVWHLQYRDVRVQKVFNGYMRITNENFVDAYENSNSTEFVSLASKVKDALKLLYSGVPFLGPYHKESAVTAFSEGSVIAYYWSEFSIPQHLVEEAERVMAEERVVMLPPRARSLKSFVVTSVVAFPTDSKTVQRTQDNSCSFGLHARGVELMRFTTPGFPDSPYPAHARCQWALRGDADSVLSLTFRSFDLASCDERGSDLVTVYNTLSPMEPHALVQLCGTYPPSYNLTFHSSQNVLLITLITNTERRHPGFEATFFQLPRMSSCGGRLRKAQGTFNSPYYPGHYPPNIDCTWNIEVPNNQHVKVRFKFFYLLEPGVPAGTCPKDYVEINGEKYCGERSQFVVTSNSNKITVRFHSDQSYTDTGFLAEYLSYDSSDPCPGQFTCRTGRCIRKELRCDGWADCTDHSDELNCSCDAGHQFTCKNKFCKPLFWVCDSVNDCGDNSDEQGCSCPAQTFRCSNGKCLSKSQQCNGKDDCGDGSDEASCPKVNVVTCTKHTYRCLNGLCLSKGNPECDGKEDCSDGSDEKDCDCGLRSFTRQARVVGGTDADEGEWPWQVSLHALGQGHFCGASLISPNWLVSAAHCYIDDRGFRYSDPTQWTAFLGLHDQSQRSAPGVQERRLKRIISHPFFNDFTFDYDIALLELEKPAEYSSMVRPISLPDTSHVFPAGKAIWVTGWGHTQYGGTGALILQKGEIRVINQTTCENLLPQQITPRMMCVGFLSGGVDSCQGDSGGPLSSVEADGRIFQAGVVSWGDGCAQRNKPGVYTRLPLFRDWIKENTGG

SEQ ID NO: 540 - protein, 855 aa, Homo sapiens
  Mutant MT-SP1 full length; CPC-0025366
MGSDRARKGGGGPKDFGAGLKYNSRHEKVNGLEEGVEFLPVNNVKKVEKHGPGRWVVLAAVLIGLLLVLLGIGFLVWHLQYRDVRVQKVFNGYMRITNENFVDAYENSNSTEFVSLASKVKDALKLLYSGVPFLGPYHKESAVTAFSEGSVIAYYWSEFSIPQHLVEEAERVMAEERVVMLPPRARSLKSFVVTSVVAFPTDSKTVQRTQDNSCSFGLHARGVELMRFTTPGFPDSPYPAHARCQWALRGDADSVLSLTFRSFDLASCDERGSDLVTVYNTLSPMEPHALVQLCGTYPPSYNLTFHSSQNVLLITLITNTERRHPGFEATFFQLPRMSSCGGRLRKAQGTFNSPYYPGHYPPNIDCTWNIEVPNNQHVKVRFKFFYLLEPGVPAGTCPKDYVEINGEKYCGERSQFVVTSNSNKITVRFHSDQSYTDTGFLAEYLSYDSSDPCPGQFTCRTGRCIRKELRCDGWADCTDHSDELNCSCDAGHQFTCKNKFCKPLFWVCDSVNDCGDNSDEQGCSCPAQTFRCSNGKCLSKSQQCNGKDDCGDGSDEASCPKVNVVTCTKHTYRCLNGLCLSKGNPECDGKEDCSDGSDEKDCDCGLRSFTRQARVVGGTDAEEGEWPWQVSLHALGQGHFCGASLISPNWLVSAAHCYIDDRGFRYSDPTQWTAFLGLHDQSQRSAPGVQERRLKRIISHPFFNDFPFDYDIALLELEKPAEYSSMVRPISLPDASHVFPAGKAIWVTGWGHIQYGGTGALILQKGEIRVINQTTCENLLPQQITPRMMCVGFLSGGVDSCQGDSGGPLSSVEADGRIFQAGVVSWGDGCAQRNKPGVYTRLPLFRDWIKENTGV

SEQ ID NO: 541 - protein, 855 aa, Homo sapiens; identical to SEQ ID NO: 538
  Mutant MT-SP1 full length; CPC-0025387

SEQ ID NO: 542 - protein, 855 aa, Homo sapiens
  Mutant MT-SP1 full length; CPC-0025582
MGSDRARKGGGGPKDFGAGLKYNSRHEKVNGLEEGVEFLPVNNVKKVEKHGPGRWVVLAAVLIGLLLVLLGIGFLVWHLQYRDVRVQKVFNGYMRITNENFVDAYENSNSTEFVSLASKVKDALKLLYSGVPFLGPYHKESAVTAFSEGSVIAYYWSEFSIPQHLVEEAERVMAEERVVMLPPRARSLKSFVVTSVVAFPTDSKTVQRTQDNSCSFGLHARGVELMRFTTPGFPDSPYPAHARCQWALRGDADSVLSLTFRSFDLASCDERGSDLVTVYNTLSPMEPHALVQLCGTYPPSYNLTFHSSQNVLLITLITNTERRHPGFEATFFQLPRMSSCGGRLRKAQGTFNSPYYPGHYPPNIDCTWNIEVPNNQHVKVRFKFFYLLEPGVPAGTCPKDYVEINGEKYCGERSQFVVTSNSNKITVRFHSDQSYTDTGFLAEYLSYDSSDPCPGQFTCRTGRCIRKELRCDGWADCTDHSDELNCSCDAGHQFTCKNKFCKPLFWVCDSVNDCGDNSDEQGCSCPAQTFRCSNGKCLSKSQQCNGKDDCGDGSDEASCPKVNVVTCTKHTYRCLNGLCLSKGNPECDGKEDCSDGSDEKDCDCGLRSFTRQARVVGGTDADEGEWPWQVSLHALGQGHFCGASLISPNWLVSAAHCYIDDRGFRYSDPTQWTAFLGLHDQSQRSAPGVQERRLKRIISHPFFNDFTFDYDIALLELEKPAEYSSMVRPISLPDASHVFPAGKAIWVTGWGHTQYGGTGALILQKGEIRVINQTTCENFLPQQITPRMMCVGFLSGGVDSCQGDSGGPLSSVEADGRIFQAGVVSWGDGCAQRNKPGVYTRLPLFRDWIKENTGG

SEQ ID NO: 543 - protein, 855 aa, Homo sapiens
  Mutant MT-SP1 full length; CPC-0025720
MGSDRARKGGGGPKDFGAGLKYNSRHEKVNGLEEGVEFLPVNNVKKVEKHGPGRWVVLAAVLIGLLLVLLGIGFLVWHLQYRDVRVQKVFNGYMRITNENFVDAYENSNSTEFVSLASKVKDALKLLYSGVPFLGPYHKESAVTAFSEGSVIAYYWSEFSIPQHLVEEAERVMAEERVVMLPPRARSLKSFVVTSVVAFPTDSKTVQRTQDNSCSFGLHARGVELMRFTTPGFPDSPYPAHARCQWALRGDADSVLSLTFRSFDLASCDERGSDLVTVYNTLSPMEPHALVQLCGTYPPSYNLTFHSSQNVLLITLITNTERRHPGFEATFFQLPRMSSCGGRLRKAQGTFNSPYYPGHYPPNIDCTWNIEVPNNQHVKVRFKFFYLLEPGVPAGTCPKDYVEINGEKYCGERSQFVVTSNSNKITVRFHSDQSYTDTGFLAEYLSYDSSDPCPGQFTCRTGRCIRKELRCDGWADCTDHSDELNCSCDAGHQFTCKNKFCKPLFWVCDSVNDCGDNSDEQGCSCPAQTFRCSNGKCLSKSQQCNGKDDCGDGSDEASCPKVNVVTCTKHTYRCLNGLCLSKGNPECDGKEDCSDGSDEKDCDCGLRSFTRQARVVGGTDADEGEWPWQVSLHALGQGHICGASLISPNWLVSAAHCYIDDRGFRYSDPTQWTAFLGLHDQSQRSAPGVQERRLKRIISHPFFNDFTFDYDIALLELEKPAEYSSMVRPISLPDASHVFPAGKAIWVTGWGRTQYGGTGALILQKGEIRVINQTTCENLLPQRITPRMMCVGFLSGGVDSCQGDSGGPLSSVEADGRIFQAGVVSWGDGCAQRNKPGVYTRLPLFRDWIKENTGV

SEQ ID NO: 544 - protein, 855 aa, Homo sapiens
  Mutant MT-SP1 full length; CPC-0025876
MGSDRARKGGGGPKDFGAGLKYNSRHEKVNGLEEGVEFLPVNNVKKVEKHGPGRWVVLAAVLIGLLLVLLGIGFLVWHLQYRDVRVQKVFNGYMRITNENFVDAYENSNSTEFVSLASKVKDALKLLYSGVPFLGPYHKESAVTAFSEGSVIAYYWSEFSIPQHLVEEAERVMAEERVVMLPPRARSLKSFVVTSVVAFPTDSKTVQRTQDNSCSFGLHARGVELMRFTTPGFPDSPYPAHARCQWALRGDADSVLSLTFRSFDLASCDERGSDLVTVYNTLSPMEPHALVQLCGTYPPSYNLTFHSSQNVLLITLITNTERRHPGFEATFFQLPRMSSCGGRLRKAQGTFNSPYYPGHYPPNIDCTWNIEVPNNQHVKVRFKFFYLLEPGVPAGTCPKDYVEINGEKYCGERSQFVVTSNSNKITVRFHSDQSYTDTGFLAEYLSYDSSDPCPGQFTCRTGRCIRKELRCDGWADCTDHSDELNCSCDAGHQFTCKNKFCKPLFWVCDSVNDCGDNSDEQGCSCPAQTFRCSNGKCLSKSQQCNGKDDCGDGSDEASCPKVNVVTCTKHTYRCLNGLCLSKGNPECDGKEDCSDGSDEKDCDCGLRSFTRQARVVGGTDADEGEWPWQVSLHALGQGHFCGASLISPNWLVSAAHCYIDDRGFRYSDPTQWTAFLGLHDQSQRSAPGVQERRLKRIISHPFFNDFTFDYDIALLELEKPAEYSSMVRPISLPDASHVFPAGKAIWVTGWGHTQYGGTGALILQKGEIRVINQTTCENFLPQQITPRMMCVGFLSGGVDSCQGDSGGPLSSVEADGRIFQAGVVSWGDGCAQRNKPGVYTRLPLFRDWIKENTGV

SEQ ID NO: 545 - protein, 855 aa, Homo sapiens; identical to SEQ ID NO: 515
  Mutant MT-SP1 full length; CPC-0025974

SEQ ID NO: 546 - protein, 855 aa, Homo sapiens
  Mutant MT-SP1 full length; CPC-0026100
MGSDRARKGGGGPKDFGAGLKYNSRHEKVNGLEEGVEFLPVNNVKKVEKHGPGRWVVLAAVLIGLLLVLLGIGFLVWHLQYRDVRVQKVFNGYMRITNENFVDAYENSNSTEFVSLASKVKDALKLLYSGVPFLGPYHKESAVTAFSEGSVIAYYWSEFSIPQHLVEEAERVMAEERVVMLPPRARSLKSFVVTSVVAFPTDSKTVQRTQDNSCSFGLHARGVELMRFTTPGFPDSPYPAHARCQWALRGDADSVLSLTFRSFDLASCDERGSDLVTVYNTLSPMEPHALVQLCGTYPPSYNLTFHSSQNVLLITLITNTERRHPGFEATFFQLPRMSSCGGRLRKAQGTFNSPYYPGHYPPNIDCTWNIEVPNNQHVKVRFKFFYLLEPGVPAGTCPKDYVEINGEKYCGERSQFVVTSNSNKITVRFHSDQSYTDTGFLAEYLSYDSSDPCPGQFTCRTGRCIRKELRCDGWADCTDHSDELNCSCDAGHQFTCKNKFCKPLFWVCDSVNDCGDNSDEQGCSCPAQTFRCSNGKCLSKSQQCNGKDDCGDGSDEASCPKVNVVTCTKHTYRCLNGLCLSKGNPECDGKEDCSDGSDEKDCDCGLRSFTRQARVVGGTDADEGEWPWQVSLHALGQGHFCGASLISPNWLVSAAHCYIDDRGFRYSDPTQWTAFLGLHDQSQRSAPGVQERRLKRIISHPFFNDFTFDYDIALLELEKPAEYSSMVRPISLPDASHVFPAGKAIWVTGWGHTQYGGTGALVLQKGEIRVINQTTCENLLPQQITPRMMCVGFLSGGVDSCQGDSGGPLSSVEADGRIFQAGVVSWGDGCAQRNKPGVYTRLPLFRDWIKENTGG

SEQ ID NO: 547 - protein, 855 aa, Homo sapiens
  Mutant MT-SP1 full length; CPC-0026323
MGSDRARKGGGGPKDFGAGLKYNSRHEKVNGLEEGVEFLPVNNVKKVEKHGPGRWVVLAAVLIGLLLVLLGIGFLVWHLQYRDVRVQKVFNGYMRITNENFVDAYENSNSTEFVSLASKVKDALKLLYSGVPFLGPYHKESAVTAFSEGSVIAYYWSEFSIPQHLVEEAERVMAEERVVMLPPRARSLKSFVVTSVVAFPTDSKTVQRTQDNSCSFGLHARGVELMRFTTPGFPDSPYPAHARCQWALRGDADSVLSLTFRSFDLASCDERGSDLVTVYNTLSPMEPHALVQLCGTYPPSYNLTFHSSQNVLLITLITNTERRHPGFEATFFQLPRMSSCGGRLRKAQGTFNSPYYPGHYPPNIDCTWNIEVPNNQHVKVRFKFFYLLEPGVPAGTCPKDYVEINGEKYCGERSQFVVTSNSNKITVRFHSDQSYTDTGFLAEYLSYDSSDPCPGQFTCRTGRCIRKELRCDGWADCTDHSDELNCSCDAGHQFTCKNKFCKPLFWVCDSVNDCGDNSDEQGCSCPAQTFRCSNGKCLSKSQQCNGKDDCGDGSDEASCPKVNVVTCTKHTYRCLNGLCLSKGNPECDGKEDCSDGSDEKDCDCGLRSFTRQARVVGGTDADEGEWPWQVSLHALGQGHFCGASLISPNWMVSAAHCYIDDRGFRYSDPTQWTAFLGLHDQSQRSAPGVQERRLKRIISHPFFNDFTFDYDIALLELEKPAEYSSMVRPISLPDASHDFPAGKAIWVTGWGHTQYGGTGALILQKGEIRVINQTTCENLLPQQITPRMMCVGFLSGGVDSCQGDSGGPLSSVEADGRIFQAGVVSWGDGCALRNKPGVYTRLPLFRDWIKENTGV

SEQ ID NO: 548 - protein, 855 aa, Homo sapiens
  Mutant MT-SP1 full length; CPC-002739
MGSDRARKGGGGPKDFGAGLKYNSRHEKVNGLEEGVEFLPVNNVKKVEKHGPGRWVVLAAVLIGLLLVLLGIGFLVWHLQYRDVRVQKVFNGYMRITNENFVDAYENSNSTEFVSLASKVKDALKLLYSGVPFLGPYHKESAVTAFSEGSVIAYYWSEFSIPQHLVEEAERVMAEERVVMLPPRARSLKSFVVTSVVAFPTDSKTVQRTQDNSCSFGLHARGVELMRFTTPGFPDSPYPAHARCQWALRGDADSVLSLTFRSFDLASCDERGSDLVTVYNTLSPMEPHALVQLCGTYPPSYNLTFHSSQNVLLITLITNTERRHPGFEATFFQLPRMSSCGGRLRKAQGTFNSPYYPGHYPPNIDCTWNIEVPNNQHVKVRFKFFYLLEPGVPAGTCPKDYVEINGEKYCGERSQFVVTSNSNKITVRFHSDQSYTDTGFLAEYLSYDSSDPCPGQFTCRTGRCIRKELRCDGWADCTDHSDELNCSCDAGHQFTCKNKFCKPLFWVCDSVNDCGDNSDEQGCSCPAQTFRCSNGKCLSKSQQCNGKDDCGDGSDEASCPKVNVVTCTKHTYRCLNGLCLSKGNPECDGKEDCSDGSDEKDCDCGLRSFTRQARVVGGTDADEGEWPWQVSLHALGQGHICGASLISPNWLVSAAHCYIDDRGFRYSDPTQWTAFLGLHDQSQRSAPGVQERRLKRIISHPFFNDFTLDYDIALLELEKPAEYSSMVRPISLPDASHVFPAGKAIWVTGWGHTQYGGTGALILQKGEIRVINQTTCENLLPQQITPRMMCVGFLSGGVDSCQGDSGGPLSSVEADGRIFQAGVVSWGDGCAQRNKPGVYTRLPLFRDWIKENTGV

SEQ ID NO: 549 - protein, 855 aa, Homo sapiens
  Mutant MT-SP1 full length; CPC-0027706
MGSDRARKGGGGPKDFGAGLKYNSRHEKVNGLEEGVEFLPVNNVKKVEKHGPGRWVVLAAVLIGLLLVLLGIGFLVWHLQYRDVRVQKVFNGYMRITNENFVDAYENSNSTEFVSLASKVKDALKLLYSGVPFLGPYHKESAVTAFSEGSVIAYYWSEFSIPQHLVEEAERVMAEERVVMLPPRARSLKSFVVTSVVAFPTDSKTVQRTQDNSCSFGLHARGVELMRFTTPGFPDSPYPAHARCQWALRGDADSVLSLTFRSFDLASCDERGSDLVTVYNTLSPMEPHALVQLCGTYPPSYNLTFHSSQNVLLITLITNTERRHPGFEATFFQLPRMSSCGGRLRKAQGTFNSPYYPGHYPPNIDCTWNIEVPNNQHVKVRFKFFYLLEPGVPAGTCPKDYVEINGEKYCGERSQFVVTSNSNKITVRFHSDQSYTDTGFLAEYLSYDSSDPCPGQFTCRTGRCIRKELRCDGWADCTDHSDELNCSCDAGHQFTCKNKFCKPLFWVCDSVNDCGDNSDEQGCSCPAQTFRCSNGKCLSKSQQCNGKDDCGDGSDEASCPKVNVVTCTKHTYRCLNGLCLSKGNPECDGKEDCSDGSDEKDCDCGLRSFTRQARVVGGTDADEGEWPWQVSLHALGQGHICGASLISPNWLVSAAHCYIDDRGFRYSDPTQWTAFLGLHDQSQRSAPGVQERRLKRIISHPFFNDYTFDYDIALLELEKPAEYSSMVRPISLPDASHVFPAGKAVWVTGWGHTQYGGTGALILQKGEIRVINQTTCENLLPQQITPRMMCVGFLSGGVDSCHGDSGGPLSIVEADGRIFQAGVVSWGDGCAQRNKPGVYTRLPLFRDWIKENTGV

SEQ ID NO: 550 - protein, 855 aa, Homo sapiens
  Mutant MT-SP1 full length; CPC-0027797
MGSDRARKGGGGPKDFGAGLKYNSRHEKVNGLEEGVEFLPVNNVKKVEKHGPGRWVVLAAVLIGLLLVLLGIGFLVWHLQYRDVRVQKVFNGYMRITNENFVDAYENSNSTEFVSLASKVKDALKLLYSGVPFLGPYHKESAVTAFSEGSVIAYYWSEFSIPQHLVEEAERVMAEERVVMLPPRARSLKSFVVTSVVAFPTDSKTVQRTQDNSCSFGLHARGVELMRFTTPGFPDSPYPAHARCQWALRGDADSVLSLTFRSFDLASCDERGSDLVTVYNTLSPMEPHALVQLCGTYPPSYNLTFHSSQNVLLITLITNTERRHPGFEATFFQLPRMSSCGGRLRKAQGTFNSPYYPGHYPPNIDCTWNIEVPNNQHVKVRFKFFYLLEPGVPAGTCPKDYVEINGEKYCGERSQFVVTSNSNKITVRFHSDQSYTDTGFLAEYLSYDSSDPCPGQFTCRTGRCIRKELRCDGWADCTDHSDELNCSCDAGHQFTCKNKFCKPLFWVCDSVNDCGDNSDEQGCSCPAQTFRCSNGKCLSKSQQCNGKDDCGDGSDEASCPKVNVVTCTKHTYRCLNGLCLSKGNPECDGKEDCSDGSDEKDCDCGLRSFTRQARVVGGTDADEGEWPWQVSLHALGQGHICGASLISPNWLVSAAHCYIDDRGFRYSDPTQWTAFLGLRDQSQRSAPGVQERRLKRIISHPFFNDFTFDYDIALLELEKPAEYSSMVRPISLPDASHVFSAGKAIWVTGWGHTQYGGTGALILQKGEIRVINQTTCENLLPQQITPRMMCVGFLSGGVDSCQGDSGGPLSSVEADGRIFQAGVVSWGVGCAQRNKPGVYTRLPLFRDWIKENTGV

SEQ ID NO: 551 - protein, 855 aa, Homo sapiens
  Mutant MT-SP1 full length; CPC-0028017
MGSDRARKGGGGPKDFGAGLKYNSRHEKVNGLEEGVEFLPVNNVKKVEKHGPGRWVVLAAVLIGLLLVLLGIGFLVWHLQYRDVRVQKVFNGYMRITNENFVDAYENSNSTEFVSLASKVKDALKLLYSGVPFLGPYHKESAVTAFSEGSVIAYYWSEFSIPQHLVEEAERVMAEERVVMLPPRARSLKSFVVTSVVAFPTDSKTVQRTQDNSCSFGLHARGVELMRFTTPGFPDSPYPAHARCQWALRGDADSVLSLTFRSFDLASCDERGSDLVTVYNTLSPMEPHALVQLCGTYPPSYNLTFHSSQNVLLITLITNTERRHPGFEATFFQLPRMSSCGGRLRKAQGTFNSPYYPGHYPPNIDCTWNIEVPNNQHVKVRFKFFYLLEPGVPAGTCPKDYVEINGEKYCGERSQFVVTSNSNKITVRFHSDQSYTDTGFLAEYLSYDSSDPCPGQFTCRTGRCIRKELRCDGWADCTDHSDELNCSCDAGHQFTCKNKFCKPLFWVCDSVNDCGDNSDEQGCSCPAQTFRCSNGKCLSKSQQCNGKDDCGDGSDEASCPKVNVVTCTKHTYRCLNGLCLSKGNPECDGKEDCSDGSDEKDCDCGLRSFTRQARVVGGTDADEGEWPWQVSLHALGQGHICGASLISPNWLVSAAHCYIDDRGFRYSDPTQWTAFLGLHDQSQRSAPGVQERRLKRIISHPFFNDFTFDYDIALLELEKPAEYSSMVRPISLPDASHVFPAGKAIWVTGWGHTQYGGTGALILQKGEIRVINQTTCENLLPQQITPRMMCVGFLSGGVDSCQGDSGGPLSSVEADGRIFQAGVVSWGVGCAQRNKPGVYTRLPLFRDWIKENTGV

SEQ ID NO: 552 - protein, 855 aa, Homo sapiens
  Mutant MT-SP1 full length; CPC-0028333
MGSDRARKGGGGPKDFGAGLKYNSRHEKVNGLEEGVEFLPVNNVKKVEKHGPGRWVVLAAVLIGLLLVLLGIGFLVWHLQYRDVRVQKVFNGYMRITNENFVDAYENSNSTEFVSLASKVKDALKLLYSGVPFLGPYHKESAVTAFSEGSVIAYYWSEFSIPQHLVEEAERVMAEERVVMLPPRARSLKSFVVTSVVAFPTDSKTVQRTQDNSCSFGLHARGVELMRFTTPGFPDSPYPAHARCQWALRGDADSVLSLTFRSFDLASCDERGSDLVTVYNTLSPMEPHALVQLCGTYPPSYNLTFHSSQNVLLITLITNTERRHPGFEATFFQLPRMSSCGGRLRKAQGTFNSPYYPGHYPPNIDCTWNIEVPNNQHVKVRFKFFYLLEPGVPAGTCPKDYVEINGEKYCGERSQFVVTSNSNKITVRFHSDQSYTDTGFLAEYLSYDSSDPCPGQFTCRTGRCIRKELRCDGWADCTDHSDELNCSCDAGHQFTCKNKFCKPLFWVCDSVNDCGDNSDEQGCSCPAQTFRCSNGKCLSKSQQCNGKDDCGDGSDEASCPKVNVVTCTKHTYRCLNGLCLSKGNPECDGKEDCSDGSDEKDCDCGLRSFTRQARVVGGTDADEGEWPWQVSLHALGQGHICGASLISPNWLVSAAHCYIDDRGFRYSDPTQWKAFLGLHDQSQRSAPGVQERRLKRIISHPLFNDYTFDYDIALLELEKPAEYSSMVRPISLPDASHVFPAGKAIWVTGWGHTQYGGTGALILQKGEIRVINQTTCENLLPQQITPRMMCVGFLSGGVDSCQGDSGGPLSSVEADGRIFQAGVVSWGVGCAQRNKPGVYTRLPLFRDWIKENTGV

SEQ ID NO: 553 - protein, 855 aa, Homo sapiens
  Mutant MT-SP1 full length; CPC-0028341
MGSDRARKGGGGPKDFGAGLKYNSRHEKVNGLEEGVEFLPVNNVKKVEKHGPGRWVVLAAVLIGLLLVLLGIGFLVWHLQYRDVRVQKVFNGYMRITNENFVDAYENSNSTEFVSLASKVKDALKLLYSGVPFLGPYHKESAVTAFSEGSVIAYYWSEFSIPQHLVEEAERVMAEERVVMLPPRARSLKSFVVTSVVAFPTDSKTVQRTQDNSCSFGLHARGVELMRFTTPGFPDSPYPAHARCQWALRGDADSVLSLTFRSFDLASCDERGSDLVTVYNTLSPMEPHALVQLCGTYPPSYNLTFHSSQNVLLITLITNTERRHPGFEATFFQLPRMSSCGGRLRKAQGTFNSPYYPGHYPPNIDCTWNIEVPNNQHVKVRFKFFYLLEPGVPAGTCPKDYVEINGEKYCGERSQFVVTSNSNKITVRFHSDQSYTDTGFLAEYLSYDSSDPCPGQFTCRTGRCIRKELRCDGWADCTDHSDELNCSCDAGHQFTCKNKFCKPLFWVCDSVNDCGDNSDEQGCSCPAQTFRCSNGKCLSKSQQCNGKDDCGDGSDEASCPKVNVVTCTKHTYRCLNGLCLSKGNPECDGKEDCSDGSDEKDCDCGLRSFTRQARVVGGTDADEGEWPWQVSLHALGQGHTCGASLISPNWLVSAAHCYIDDRGFRYSDPTQWTAFLGLHDQSQRSAPGVQERRLKRIISHPFFNDFTFDYDIALLELEKPAEYSSMVRPISLPDASHVFPAGKAIWVTGWGHTQYGGTGALILQKGEIRVINQTTCENLLSQQITPRMMCVGFLSGGVDSCQGDSGGPLSSVEADGRIFLAGVVSWGDGCAQRNKPGVYTRLPLFRDWIKENTGV

SEQ ID NO: 554 - protein, 855 aa, Homo sapiens
  Mutant MT-SP1 full length; CPC-0033634
MGSDRARKGGGGPKDFGAGLKYNSRHEKVNGLEEGVEFLPVNNVKKVEKHGPGRWVVLAAVLIGLLLVLLGIGFLVWHLQYRDVRVQKVFNGYMRITNENFVDAYENSNSTEFVSLASKVKDALKLLYSGVPFLGPYHKESAVTAFSEGSVIAYYWSEFSIPQHLVEEAERVMAEERVVMLPPRARSLKSFVVTSVVAFPTDSKTVQRTQDNSCSFGLHARGVELMRFTTPGFPDSPYPAHARCQWALRGDADSVLSLTFRSFDLASCDERGSDLVTVYNTLSPMEPHALVQLCGTYPPSYNLTFHSSQNVLLITLITNTERRHPGFEATFFQLPRMSSCGGRLRKAQGTFNSPYYPGHYPPNIDCTWNIEVPNNQHVKVRFKFFYLLEPGVPAGTCPKDYVEINGEKYCGERSQFVVTSNSNKITVRFHSDQSYTDTGFLAEYLSYDSSDPCPGQFTCRTGRCIRKELRCDGWADCTDHSDELNCSCDAGHQFTCKNKFCKPLFWVCDSVNDCGDNSDEQGCSCPAQTFRCSNGKCLSKSQQCNGKDDCGDGSDEASCPKVNVVTCTKHTYRCLNGLCLSKGNPECDGKEDCSDGSDEKDCDCGLRSFTRQARVVGGTDADEGEWPWQVSLHALGQGHICGASLISPNWLVSAAHCYIDDRGFRYSDPTQWTAFLGLHDQSQRSAPGVQERRLKRIISHPLFNDFTFDYDIALLELEKPAEYSSMVRPISLPDASHVFPAGKAIWVTGWGHTQYGGTGALILQKGEIRVINQTTCENLLPQQITPRMMCVGFLSGGVDSCQGDSGGPLSSVEADGRIFQAGVVSWGDGCAQRNKPGVYTRLPLLRDWIKENTGV

SEQ ID NO: 555 - protein, 855 aa, Homo sapiens; identical to SEQ ID NO: 515
  Mutant MT-SP1 full length; CPC-0028791

SEQ ID NO: 556 - protein, 855 aa, Homo sapiens
  Mutant MT-SP1 full length; CPC-0027484
MGSDRARKGGGGPKDFGAGLKYNSRHEKVNGLEEGVEFLPVNNVKKVEKHGPGRWVVLAAVLIGLLLVLLGIGFLVWHLQYRDVRVQKVFNGYMRITNENFVDAYENSNSTEFVSLASKVKDALKLLYSGVPFLGPYHKESAVTAFSEGSVIAYYWSEFSIPQHLVEEAERVMAEERVVMLPPRARSLKSFVVTSVVAFPTDSKTVQRTQDNSCSFGLHARGVELMRFTTPGFPDSPYPAHARCQWALRGDADSVLSLTFRSFDLASCDERGSDLVTVYNTLSPMEPHALVQLCGTYPPSYNLTFHSSQNVLLITLITNTERRHPGFEATFFQLPRMSSCGGRLRKAQGTFNSPYYPGHYPPNIDCTWNIEVPNNQHVKVRFKFFYLLEPGVPAGTCPKDYVEINGEKYCGERSQFVVTSNSNKITVRFHSDQSYTDTGFLAEYLSYDSSDPCPGQFTCRTGRCIRKELRCDGWADCTDHSDELNCSCDAGHQFTCKNKFCKPLFWVCDSVNDCGDNSDEQGCSCPAQTFRCSNGKCLSKSQQCNGKDDCGDGSDEASCPKVNVVTCTKHTYRCLNGLCLSKGNPECDGKEDCSDGSDEKDCDCGLRSFTRQARVVGGTDADEGEWPWQVSLHALGQGHICGASLISPNWLVSAAHCYIDDRGFRYSDPTQWTAFLGLHDQSQRSAPGVQERRLKRIISHPFFKDFTFDYDIALLELEKPAEYSSMVRPISLPDASHVFPAGKAIWVTGWGHTQYGGTGALILQKGEIRVINQTTCENLLPQQITPRMMCVGFLSGGVDSCQGDSGGPLSSVEADGRIFQAGVVSWGDGCAQRNKPGVYTRLPLFRDWIKENTGV

SEQ ID NO: 557 - protein, 855 aa, Homo sapiens
  Mutant MT-SP1 full length; CPC-0028993
MGSDRARKGGGGPKDFGAGLKYNSRHEKVNGLEEGVEFLPVNNVKKVEKHGPGRWVVLAAVLIGLLLVLLGIGFLVWHLQYRDVRVQKVFNGYMRITNENFVDAYENSNSTEFVSLASKVKDALKLLYSGVPFLGPYHKESAVTAFSEGSVIAYYWSEFSIPQHLVEEAERVMAEERVVMLPPRARSLKSFVVTSVVAFPTDSKTVQRTQDNSCSFGLHARGVELMRFTTPGFPDSPYPAHARCQWALRGDADSVLSLTFRSFDLASCDERGSDLVTVYNTLSPMEPHALVQLCGTYPPSYNLTFHSSQNVLLITLITNTERRHPGFEATFFQLPRMSSCGGRLRKAQGTFNSPYYPGHYPPNIDCTWNIEVPNNQHVKVRFKFFYLLEPGVPAGTCPKDYVEINGEKYCGERSQFVVTSNSNKITVRFHSDQSYTDTGFLAEYLSYDSSDPCPGQFTCRTGRCIRKELRCDGWADCTDHSDELNCSCDAGHQFTCKNKFCKPLFWVCDSVNDCGDNSDEQGCSCPAQTFRCSNGKCLSKSQQCNGKDDCGDGSDEASCPKVNVVTCTKHTYRCLNGLCLSKGNPECDGKEDCSDGSDEKDCDCGLRSFTRQARVVGGTDADEGEWPWQVSLHALGQGHICGASLISPNWLVSAAHCYIDDRGFRSSDPTQWTAFLGLHDQSQRSAPGVQERRLKRIISHPFFNDFTFDYDIALLELEKPAEYSSMVRPISLPDASHVFPAGKAIWVTGWGHTQYGGTGALILQKGEIRVINQTTCENLLPQRITPRMMCVGFLSGGVDSCQGDSGGPLSSVEADGRIFQAGVVSWGDGCAQRNKPGVYTRLPLFRDWIKENTGV

SEQ ID NO: 558 - protein, 26 aa, Artificial Sequence
  N-terminal sequence of pIVEX 2.3d MTSP
MEKTRHHHHHHSGSDCGLRSFTRQAR

SEQ ID NO: 559 - DNA, 3560 bp, Artificial Sequence
  pIVEX 2.3d vector
tcgcgcgtttcggtgatgacggtgaaaacctctgacacatgcagctcccggagacggtcacagcttgtctgtaagcggatgccgggagcagacaagcccgtcagggcgcgtcagcgggtgttggcgggtgtcggggctggcttaactatgcggcatcagagcagattgtactgagagtgcaccatatatgcggtgtgaaataccgcacagatgcgtaaggagaaaataccgcatcaggcgccattcgccattcaggctgcgcaactgttgggaagggcgatcggtgcgggcctcttcgctattacgccagctggcgaaagggggatgtgctgcaaggcgattaagttgggtaacgccagggttttcccagtcacgacgttgtaaaacgacggccagtgccaagcttgcatgcaaggagatggcgcccaacagtcccccggccacggggcctgccaccatacccacgccgaaacaagcgctcatgagcccgaagtggcgagcccgatcttccccatcggtgatgtcggcgatataggcgccagcaaccgcacctgtggcgccggtgatgccggccacgatgcgtccggcgtagaggatcgagatctcgatcccgcgaaattaatacgactcactatagggagaccacaacggtttccctctagaaataattttgtttaactttaagaaggagatataccatggcacatatgagcggccgcgtcgactcgagcgagctcccggggggggttctcatcatcatcatcatcattaataaaagggcgaattccagcacactggcggccgttactagtggatccggctgctaacaaagcccgaaaggaagctgagttggctgctgccaccgctgagcaataactagcataaccccttggggcctctaaacgggtcttgaggggttttttgctgaaaggaggaactatatccggatatccacaggacgggtgtggtcgccatgatcgcgtagtcgatagtggctccaagtagcgaagcgagcaggactgggcggcggccaaagcggtcggacagtgctccgagaacgggtgcgcatagaaattgcatcaacgcatatagcgctagcagcacgccatagtgactggcgatgctgtcggaatggacgatatcccgcaagaggcccggcagtaccggcataaccaagcctatgcctacagcatccagggtgacggtgccgaggatgacgatgagcgcattgttagatttcatacacggtgcctgactgcgttagcaatttaactgtgataaactaccgcattaaagcttatcgatgataagctgtcaaacatgagaattcgtaatcatgtcatagctgtttcctgtgtgaaattgttatccgctcacaattccacacaacatacgagccggaagcataaagtgtaaagcctggggtgcctaatgagtgagctaactcacattaattgcgttgcgctcactgcccgctttccagtcgggaaacctgtcgtgccagctgcattaatgaatcggccaacgcgcggggagaggcggtttgcgtattgggcgctcttccgcttcctcgctcactgactcgctgcgctcggtcgttcggctgcggcgagcggtatcagctcactcaaaggcggtaatacggttatccacagaatcaggggataacgcaggaaagaacatgtgagcaaaaggccagcaaaaggccaggaaccgtaaaaaggccgcgttgctggcgtttttccataggctccgcccccctgacgagcatcacaaaaatcgacgctcaagtcagaggtggcgaaacccgacaggactataaagataccaggcgtttccccctggaagctccctcgtgcgctctcctgttccgaccctgccgcttaccggatacctgtccgcctttctcccttcgggaagcgtggcgctttctcatagctcacgctgtaggtatctcagttcggtgtaggtcgttcgctccaagctgggctgtgtgcacgaaccccccgttcagcccgaccgctgcgccttatccggtaactatcgtcttgagtccaacccggtaagacacgacttatcgccactggcagcagccactggtaacaggattagcagagcgaggtatgtaggcggtgctacagagttcttgaagtggtggcctaactacggctacactagaaggacagtatttggtatctgcgctctgctgaagccagttaccttcggaaaaagagttggtagctcttgatccggcaaacaaaccaccgctggtagcggtggtttttttgtttgcaagcagcagattacgcgcagaaaaaaaggatctcaagaagatcctttgatcttttctacggggtctgacgctcagtggaacgaaaactcacgttaagggattttggtcatgagattatcaaaaaggatcttcacctagatccttttaaattaaaaatgaagttttaaatcaatctaaagtatatatgagtaaacttggtctgacagttaccaatgcttaatcagtgaggcacctatctcagcgatctgtctatttcgttcatccatagttgcctgactccccgtcgtgtagataactacgatacgggagggcttaccatctggccccagtgctgcaatgataccgcgagacccacgctcaccggctccagatttatcagcaataaaccagccagccggaagggccgagcgcagaagtggtcctgcaactttatccgcctccatccagtctattaattgttgccgggaagctagagtaagtagttcgccagttaatagtttgcgcaacgttgttgccattgctacaggcatcgtggtgtcacgctcgtcgtttggtatggcttcattcagctccggttcccaacgatcaaggcgagttacatgatcccccatgttgtgcaaaaaagcggttagctccttcggtcctccgatcgttgtcagaagtaagttggccgcagtgttatcactcatggttatggcagcactgcataattctcttactgtcatgccatccgtaagatgcttttctgtgactggtgagtactcaaccaagtcattctgagaatagtgtatgcggcgaccgagttgctcttgcccggcgtcaatacgggataataccgcgccacatagcagaactttaaaagtgctcatcattggaaaacgttcttcggggcgaaaactctcaaggatcttaccgctgttgagatccagttcgatgtaacccactcgtgcacccaactgatcttcagcatcttttactttcaccagcgtttctgggtgagcaaaaacaggaaggcaaaatgccgcaaaaaagggaataagggcgacacggaaatgttgaatactcatactcttcctttttcaatattattgaagcatttatcagggttattgtctcatgagcggatacatatttgaatgtatttagaaaaataaacaaataggggttccgcgcacatttccccgaaaagtgccacctgacgtctaagaaaccattattatcatgacattaacctataaaaataggcgtatcacgaggccctttcgtc

SEQ ID NO: 560 - DNA, 36 bp, Artificial Sequence
  pQE-Insert-F2 forward primer
ttcacgagacaggctcgtgttgttgggggcacggat

SEQ ID NO: 561 - DNA, 37 bp, Artificial Sequence
  pQE-Insert-R3 reverse primer
cagctaattaagcttattataccccagtgttctcttt

SEQ ID NO: 562 - DNA, 30 bp, Artificial Sequence
  pQE-Linear-F2 primer
acgagcctgtctcgtgaatgaccgcagccc

SEQ ID NO: 563 - DNA, 31 bp, Artificial Sequence
  pQE-Linear-R1 primer
taataagcttaattagctgagcttggactcc

SEQ ID NO: 564 - DNA, 19 bp, Artificial Sequence
  forward primer: MTSP-5F
ggagaaaccggcagagtac

SEQ ID NO: 565 - DNA, 19 bp, Artificial Sequence
  reverse primer MTSP-5R
ggttctcgcaggtggtctg

SEQ ID NO: 566 - DNA, 5443 bp, Artificial Sequence
  pET21a vector
atccggatatagttcctcctttcagcaaaaaacccctcaagacccgtttagaggccccaaggggttatgctagttattgctcagcggtggcagcagccaactcagcttcctttcgggctttgttagcagccggatctcagtggtggtggtggtggtgctcgagtgcggccgcaagcttgtcgacggagctcgaattcggatccgcgacccatttgctgtccaccagtcatgctagccatatgtatatctccttcttaaagttaaacaaaattatttctagaggggaattgttatccgctcacaattcccctatagtgagtcgtattaatttcgcgggatcgagatctcgatcctctacgccggacgcatcgtggccggcatcaccggcgccacaggtgcggttgctggcgcctatatcgccgacatcaccgatggggaagatcgggctcgccacttcgggctcatgagcgcttgtttcggcgtgggtatggtggcaggccccgtggccgggggactgttgggcgccatctccttgcatgcaccattccttgcggcggcggtgctcaacggcctcaacctactactgggctgcttcctaatgcaggagtcgcataagggagagcgtcgagatcccggacaccatcgaatggcgcaaaacctttcgcggtatggcatgatagcgcccggaagagagtcaattcagggtggtgaatgtgaaaccagtaacgttatacgatgtcgcagagtatgccggtgtctcttatcagaccgtttcccgcgtggtgaaccaggccagccacgtttctgcgaaaacgcgggaaaaagtggaagcggcgatggcggagctgaattacattcccaaccgcgtggcacaacaactggcgggcaaacagtcgttgctgattggcgttgccacctccagtctggccctgcacgcgccgtcgcaaattgtcgcggcgattaaatctcgcgccgatcaactgggtgccagcgtggtggtgtcgatggtagaacgaagcggcgtcgaagcctgtaaagcggcggtgcacaatcttctcgcgcaacgcgtcagtgggctgatcattaactatccgctggatgaccaggatgccattgctgtggaagctgcctgcactaatgttccggcgttatttcttgatgtctctgaccagacacccatcaacagtattattttctcccatgaagacggtacgcgactgggcgtggagcatctggtcgcattgggtcaccagcaaatcgcgctgttagcgggcccattaagttctgtctcggcgcgtctgcgtctggctggctggcataaatatctcactcgcaatcaaattcagccgatagcggaacgggaaggcgactggagtgccatgtccggttttcaacaaaccatgcaaatgctgaatgagggcatcgttcccactgcgatgctggttgccaacgatcagatggcgctgggcgcaatgcgcgccattaccgagtccgggctgcgcgttggtgcggatatctcggtagtgggatacgacgataccgaagacagctcatgttatatcccgccgttaaccaccatcaaacaggattttcgcctgctggggcaaaccagcgtggaccgcttgctgcaactctctcagggccaggcggtgaagggcaatcagctgttgcccgtctcactggtgaaaagaaaaaccaccctggcgcccaatacgcaaaccgcctctccccgcgcgttggccgattcattaatgcagctggcacgacaggtttcccgactggaaagcgggcagtgagcgcaacgcaattaatgtaagttagctcactcattaggcaccgggatctcgaccgatgcccttgagagccttcaacccagtcagctccttccggtgggcgcggggcatgactatcgtcgccgcacttatgactgtcttctttatcatgcaactcgtaggacaggtgccggcagcgctctgggtcattttcggcgaggaccgctttcgctggagcgcgacgatgatcggcctgtcgcttgcggtattcggaatcttgcacgccctcgctcaagccttcgtcactggtcccgccaccaaacgtttcggcgagaagcaggccattatcgccggcatggcggccccacgggtgcgcatgatcgtgctcctgtcgttgaggacccggctaggctggcggggttgccttactggttagcagaatgaatcaccgatacgcgagcgaacgtgaagcgactgctgctgcaaaacgtctgcgacctgagcaacaacatgaatggtcttcggtttccgtgtttcgtaaagtctggaaacgcggaagtcagcgccctgcaccattatgttccggatctgcatcgcaggatgctgctggctaccctgtggaacacctacatctgtattaacgaagcgctggcattgaccctgagtgatttttctctggtcccgccgcatccataccgccagttgtttaccctcacaacgttccagtaaccgggcatgttcatcatcagtaacccgtatcgtgagcatcctctctcgtttcatcggtatcattacccccatgaacagaaatcccccttacacggaggcatcagtgaccaaacaggaaaaaaccgcccttaacatggcccgctttatcagaagccagacattaacgcttctggagaaactcaacgagctggacgcggatgaacaggcagacatctgtgaatcgcttcacgaccacgctgatgagctttaccgcagctgcctcgcgcgtttcggtgatgacggtgaaaacctctgacacatgcagctcccggagacggtcacagcttgtctgtaagcggatgccgggagcagacaagcccgtcagggcgcgtcagcgggtgttggcgggtgtcggggcgcagccatgacccagtcacgtagcgatagcggagtgtatactggcttaactatgcggcatcagagcagattgtactgagagtgcaccatatatgcggtgtgaaataccgcacagatgcgtaaggagaaaataccgcatcaggcgctcttccgcttcctcgctcactgactcgctgcgctcggtcgttcggctgcggcgagcggtatcagctcactcaaaggcggtaatacggttatccacagaatcaggggataacgcaggaaagaacatgtgagcaaaaggccagcaaaaggccaggaaccgtaaaaaggccgcgttgctggcgtttttccataggctccgcccccctgacgagcatcacaaaaatcgacgctcaagtcagaggtggcgaaacccgacaggactataaagataccaggcgtttccccctggaagctccctcgtgcgctctcctgttccgaccctgccgcttaccggatacctgtccgcctttctcccttcgggaagcgtggcgctttctcatagctcacgctgtaggtatctcagttcggtgtaggtcgttcgctccaagctgggctgtgtgcacgaaccccccgttcagcccgaccgctgcgccttatccggtaactatcgtcttgagtccaacccggtaagacacgacttatcgccactggcagcagccactggtaacaggattagcagagcgaggtatgtaggcggtgctacagagttcttgaagtggtggcctaactacggctacactagaaggacagtatttggtatctgcgctctgctgaagccagttaccttcggaaaaagagttggtagctcttgatccggcaaacaaaccaccgctggtagcggtggtttttttgtttgcaagcagcagattacgcgcagaaaaaaaggatctcaagaagatcctttgatcttttctacggggtctgacgctcagtggaacgaaaactcacgttaagggattttggtcatgagattatcaaaaaggatcttcacctagatccttttaaattaaaaatgaagttttaaatcaatctaaagtatatatgagtaaacttggtctgacagttaccaatgcttaatcagtgaggcacctatctcagcgatctgtctatttcgttcatccatagttgcctgactccccgtcgtgtagataactacgatacgggagggcttaccatctggccccagtgctgcaatgataccgcgagacccacgctcaccggctccagatttatcagcaataaaccagccagccggaagggccgagcgcagaagtggtcctgcaactttatccgcctccatccagtctattaattgttgccgggaagctagagtaagtagttcgccagttaatagtttgcgcaacgttgttgccattgctgcaggcatcgtggtgtcacgctcgtcgtttggtatggcttcattcagctccggttcccaacgatcaaggcgagttacatgatcccccatgttgtgcaaaaaagcggttagctccttcggtcctccgatcgttgtcagaagtaagttggccgcagtgttatcactcatggttatggcagcactgcataattctcttactgtcatgccatccgtaagatgcttttctgtgactggtgagtactcaaccaagtcattctgagaatagtgtatgcggcgaccgagttgctcttgcccggcgtcaatacgggataataccgcgccacatagcagaactttaaaagtgctcatcattggaaaacgttcttcggggcgaaaactctcaaggatcttaccgctgttgagatccagttcgatgtaacccactcgtgcacccaactgatcttcagcatcttttactttcaccagcgtttctgggtgagcaaaaacaggaaggcaaaatgccgcaaaaaagggaataagggcgacacggaaatgttgaatactcatactcttcctttttcaatattattgaagcatttatcagggttattgtctcatgagcggatacatatttgaatgtatttagaaaaataaacaaataggggttccgcgcacatttccccgaaaagtgccacctgaaattgtaaacgttaatattttgttaaaattcgcgttaaatttttgttaaatcagctcattttttaaccaataggccgaaatcggcaaaatcccttataaatcaaaagaatagaccgagatagggttgagtgttgttccagtttggaacaagagtccactattaaagaacgtggactccaacgtcaaagggcgaaaaaccgtctatcagggcgatggcccactacgtgaaccatcaccctaatcaagttttttggggtcgaggtgccgtaaagcactaaatcggaaccctaaagggagcccccgatttagagcttgacggggaaagccggcgaacgtggcgagaaaggaagggaagaaagcgaaaggagcgggcgctagggcgctggcaagtgtagcggtcacgctgcgcgtaaccaccacacccgccgcgcttaatgcgccgctacagggcgcgtcccattcgcca

SEQ ID NO: 567 - protein, 379 aa, Homo sapiens
  PAI-1 stable
VHHPPSYVAHLASDFGVRVFQQVAQASKDRNVVFSPYGVASVLAMLQLTTGGETQQQIQAAMGFKIDDKGMAPALRHLYKELMGPWNKDEISTTDAIFVQRDLKLVQGFMPHFFRLFRSTVKQVDFSEVERARFIINDWVKTHTKGMISHLLGTGAVDQLTRLVLVNALYFNGQWKTPFPDSSTHRRLFHKSDGSTVSVPMMAQTNKFNYTEFTTPDGHYYDILELPYHGDTLSMFIAAPYEKEVPLSALTNILSAQLISHWKGNMTRLPRLLVLPKFSLETEVDLRKPLENLGMTDMFRQFQADFTSLSDQEPLHVALALQKVKIEVNESGTVASSSTAVIVSARMAPEEIIIDRPFLFVVRHNPTGTVLFMGQVMEP

SEQ ID NO: 568 - protein, 241 aa, Homo sapiens
  Mutant MTSP1 protease domain; I136T/N164D/T166A/F184(A)L/D217V
VVGGTDADEGEWPWQVSLHALGQGHICGASLISPNWLVSAAHCYIDDRGFRYSDPTQWTAFLGLHDQSQRSAPGVQERRLKRIISHPFFNDFTFDYDIALLELEKPAEYSSMVRPICLPDASHVFPAGKATWVTGWGHTQYGGTGALILQKGEIRVIDQATCENLLPQQITPRMMCVGLLSGGVDSCQGDSGGPLSSVEADGRIFQAGVVSWGVGCAQRNKPGVYTRLPLFRDWIKENTGV

SEQ ID NO: 569 - protein, 241 aa, Homo sapiens
  Mutant MTSP1 protease domain; I41F
VVGGTDADEGEWPWQVSLHALGQGHFCGASLISPNWLVSAAHCYIDDRGFRYSDPTQWTAFLGLHDQSQRSAPGVQERRLKRIISHPFFNDFTFDYDIALLELEKPAEYSSMVRPICLPDASHVFPAGKAIWVTGWGHTQYGGTGALILQKGEIRVINQTTCENLLPQQITPRMMCVGFLSGGVDSCQGDSGGPLSSVEADGRIFQAGVVSWGDGCAQRNKPGVYTRLPLFRDWIKENTGV

SEQ ID NO: 570 - protein, 241 aa, Homo sapiens
  Mutant MTSP1 protease domain; I41F/A126T/V244G
VVGGTDADEGEWPWQVSLHALGQGHFCGASLISPNWLVSAAHCYIDDRGFRYSDPTQWTAFLGLHDQSQRSAPGVQERRLKRIISHPFFNDFTFDYDIALLELEKPAEYSSMVRPICLPDTSHVFPAGKAIWVTGWGHTQYGGTGALILQKGEIRVINQTTCENLLPQQITPRMMCVGFLSGGVDSCQGDSGGPLSSVEADGRIFQAGVVSWGDGCAQRNKPGVYTRLPLFRDWIKENTGG

SEQ ID NO: 571 - protein, 241 aa, Homo sapiens
  Mutant MTSP1 protease domain; D23E/I41F/T98P/T144I
VVGGTDAEEGEWPWQVSLHALGQGHFCGASLISPNWLVSAAHCYIDDRGFRYSDPTQWTAFLGLHDQSQRSAPGVQERRLKRIISHPFFNDFPFDYDIALLELEKPAEYSSMVRPICLPDASHVFPAGKAIWVTGWGHIQYGGTGALILQKGEIRVINQTTCENLLPQQITPRMMCVGFLSGGVDSCQGDSGGPLSSVEADGRIFQAGVVSWGDGCAQRNKPGVYTRLPLFRDWIKENTGV

SEQ ID NO: 572 - protein, 241 aa, Homo sapiens; identical to SEQ ID NO: 569
  Mutant MTSP1 protease domain; I41F

SEQ ID NO: 573 - protein, 241 aa, Homo sapiens
  Mutant MTSP1 protease domain; I41F/L171F/V244G
VVGGTDADEGEWPWQVSLHALGQGHFCGASLISPNWLVSAAHCYIDDRGFRYSDPTQWTAFLGLHDQSQRSAPGVQERRLKRIISHPFFNDFTFDYDIALLELEKPAEYSSMVRPICLPDASHVFPAGKAIWVTGWGHTQYGGTGALILQKGEIRVINQTTCENFLPQQITPRMMCVGFLSGGVDSCQGDSGGPLSSVEADGRIFQAGVVSWGDGCAQRNKPGVYTRLPLFRDWIKENTGG

SEQ ID NO: 574 - protein, 241 aa, Homo sapiens
  Mutant MTSP1 protease domain; H143R/Q175R
VVGGTDADEGEWPWQVSLHALGQGHICGASLISPNWLVSAAHCYIDDRGFRYSDPTQWTAFLGLHDQSQRSAPGVQERRLKRIISHPFFNDFTFDYDIALLELEKPAEYSSMVRPICLPDASHVFPAGKAIWVTGWGRTQYGGTGALILQKGEIRVINQTTCENLLPQRITPRMMCVGFLSGGVDSCQGDSGGPLSSVEADGRIFQAGVVSWGDGCAQRNKPGVYTRLPLFRDWIKENTGV

SEQ ID NO: 575 - protein, 241 aa, Homo sapiens
  Mutant MTSP1 protease domain; I41F/L171F
VVGGTDADEGEWPWQVSLHALGQGHFCGASLISPNWLVSAAHCYIDDRGFRYSDPTQWTAFLGLHDQSQRSAPGVQERRLKRIISHPFFNDFTFDYDIALLELEKPAEYSSMVRPICLPDASHVFPAGKAIWVTGWGHTQYGGTGALILQKGEIRVINQTTCENFLPQQITPRMMCVGFLSGGVDSCQGDSGGPLSSVEADGRIFQAGVVSWGDGCAQRNKPGVYTRLPLFRDWIKENTGV

SEQ ID NO: 576 - protein, 241 aa, Homo sapiens [sequence omitted]

SEQ ID NO: 577 - protein, 241 aa, Homo sapiens
  Mutant MTSP1 protease domain; I41F/I154V/V244G
VVGGTDADEGEWPWQVSLHALGQGHFCGASLISPNWLVSAAHCYIDDRGFRYSDPTQWTAFLGLHDQSQRSAPGVQERRLKRIISHPFFNDFTFDYDIALLELEKPAEYSSMVRPICLPDASHVFPAGKAIWVTGWGHTQYGGTGALVLQKGEIRVINQTTCENLLPQQITPRMMCVGFLSGGVDSCQGDSGGPLSSVEADGRIFQAGVVSWGDGCAQRNKPGVYTRLPLFRDWIKENTGG

SEQ ID NO: 578 - protein, 241 aa, Homo sapiens
  Mutant MTSP1 protease domain; I141F/L52M/V129D/Q221(A)L
VVGGTDADEGEWPWQVSLHALGQGHFCGASLISPNWMVSAAHCYIDDRGFRYSDPTQWTAFLGLHDQSQRSAPGVQERRLKRIISHPFFNDFTFDYDIALLELEKPAEYSSMVRPICLPDASHDFPAGKAIWVTGWGHTQYGGTGALILQKGEIRVINQTTCENLLPQQITPRMMCVGFLSGGVDSCQGDSGGPLSSVEADGRIFQAGVVSWGDGCALRNKPGVYTRLPLFRDWIKENTGV

SEQ ID NO: 579 - protein, 241 aa, Homo sapiens
  Mutant MTSP1 protease domain; F99L
VVGGTDADEGEWPWQVSLHALGQGHICGASLISPNWLVSAAHCYIDDRGFRYSDPTQWTAFLGLHDQSQRSAPGVQERRLKRIISHPFFNDFTLDYDIALLELEKPAEYSSMVRPICLPDASHVFPAGKAIWVTGWGHTQYGGTGALILQKGEIRVINQTTCENLLPQQITPRMMCVGFLSGGVDSCQGDSGGPLSSVEADGRIFQAGVVSWGDGCAQRNKPGVYTRLPLFRDWIKENTGV

SEQ ID NO: 580 - protein, 241 aa, Homo sapiens
  Mutant MTSP1 protease domain; F97Y/I136V/Q192H/S201I
VVGGTDADEGEWPWQVSLHALGQGHICGASLISPNWLVSAAHCYIDDRGFRYSDPTQWTAFLGLHDQSQRSAPGVQERRLKRIISHPFFNDYTFDYDIALLELEKPAEYSSMVRPICLPDASHVFPAGKAVWVTGWGHTQYGGTGALILQKGEIRVINQTTCENLLPQQITPRMMCVGFLSGGVDSCHGDSGGPLSIVEADGRIFQAGVVSWGDGCAQRNKPGVYTRLPLFRDWIKENTGV

SEQ ID NO: 581 - protein, 241 aa, Homo sapiens
  Mutant MTSP1 protease domain; H71R/P131S/D217V
VVGGTDADEGEWPWQVSLHALGQGHICGASLISPNWLVSAAHCYIDDRGFRYSDPTQWTAFLGLRDQSQRSAPGVQERRLKRIISHPFFNDFTFDYDIALLELEKPAEYSSMVRPICLPDASHVFSAGKAIWVTGWGHTQYGGTGALILQKGEIRVINQTTCENLLPQQITPRMMCVGFLSGGVDSCQGDSGGPLSSVEADGRIFQAGVVSWGVGCAQRNKPGVYTRLPLFRDWIKENTGV

SEQ ID NO: 582 - protein, 241 aa, Homo sapiens
  Mutant MTSP1 protease domain; D217V
VVGGTDADEGEWPWQVSLHALGQGHICGASLISPNWLVSAAHCYIDDRGFRYSDPTQWTAFLGLHDQSQRSAPGVQERRLKRIISHPFFNDFTFDYDIALLELEKPAEYSSMVRPICLPDASHVFPAGKAIWVTGWGHTQYGGTGALILQKGEIRVINQTTCENLLPQQITPRMMCVGFLSGGVDSCQGDSGGPLSSVEADGRIFQAGVVSWGVGCAQRNKPGVYTRLPLFRDWIKENTGV

SEQ ID NO: 583 - protein, 241 aa, Homo sapiens
  Mutant MTSP1 protease domain; T65K/F93L/F97Y/D217V
VVGGTDADEGEWPWQVSLHALGQGHICGASLISPNWLVSAAHCYIDDRGFRYSDPTQWKAFLGLHDQSQRSAPGVQERRLKRIISHPLFNDYTFDYDIALLELEKPAEYSSMVRPICLPDASHVFPAGKAIWVTGWGHTQYGGTGALILQKGEIRVINQTTCENLLPQQITPRMMCVGFLSGGVDSCQGDSGGPLSSVEADGRIFQAGVVSWGVGCAQRNKPGVYTRLPLFRDWIKENTGV

SEQ ID NO: 584 - protein, 241 aa, Homo sapiens
  Mutant MTSP1 protease domain; I41T/P173S/Q209L
VVGGTDADEGEWPWQVSLHALGQGHTCGASLISPNWLVSAAHCYIDDRGFRYSDPTQWTAFLGLHDQSQRSAPGVQERRLKRIISHPFFNDFTFDYDIALLELEKPAEYSSMVRPICLPDASHVFPAGKAIWVTGWGHTQYGGTGALILQKGEIRVINQTTCENLLSQQITPRMMCVGFLSGGVDSCQGDSGGPLSSVEADGRIFLAGVVSWGDGCAQRNKPGVYTRLPLFRDWIKENTGV

SEQ ID NO: 585 - protein, 241 aa, Homo sapiens
  Mutant MTSP1 protease domain; F97L//F234L
VVGGTDADEGEWPWQVSLHALGQGHICGASLISPNWLVSAAHCYIDDRGFRYSDPTQWTAFLGLHDQSQRSAPGVQERRLKRIISHPLFNDFTFDYDIALLELEKPAEYSSMVRPICLPDASHVFPAGKAIWVTGWGHTQYGGTGALILQKGEIRVINQTTCENLLPQQITPRMMCVGFLSGGVDSCQGDSGGPLSSVEADGRIFQAGVVSWGDGCAQRNKPGVYTRLPLLRDWIKENTGV

SEQ ID NO: 586 - protein, 241 aa, Homo sapiens [sequence omitted]

SEQ ID NO: 587 - protein, 241 aa, Homo sapiens
  Mutant MTSP1 protease domain; N95K
VVGGTDADEGEWPWQVSLHALGQGHICGASLISPNWLVSAAHCYIDDRGFRYSDPTQWTAFLGLHDQSQRSAPGVQERRLKRIISHPFFKDFTFDYDIALLELEKPAEYSSMVRPICLPDASHVFPAGKAIWVTGWGHTQYGGTGALILQKGEIRVINQTTCENLLPQQITPRMMCVGFLSGGVDSCQGDSGGPLSSVEADGRIFQAGVVSWGDGCAQRNKPGVYTRLPLFRDWIKENTGV

SEQ ID NO: 588 - protein, 241 aa, Homo sapiens
  Mutant MTSP1 protease domain; Y60(G)S
VVGGTDADEGEWPWQVSLHALGQGHICGASLISPNWLVSAAHCYIDDRGFRSSDPTQWTAFLGLHDQSQRSAPGVQERRLKRIISHPFFNDFTFDYDIALLELEKPAEYSSMVRPICLPDASHVFPAGKAIWVTGWGHTQYGGTGALILQKGEIRVINQTTCENLLPQRITPRMMCVGFLSGGVDSCQGDSGGPLSSVEADGRIFQAGVVSWGDGCAQRNKPGVYTRLPLFRDWIKENTGV

SEQ ID NO: 589 - protein, 855 aa, Homo sapiens
  Mutant MTSP1 full length; I136T/N164D/T166A/F184(A)L/D217V
MGSDRARKGGGGPKDFGAGLKYNSRHEKVNGLEEGVEFLPVNNVKKVEKHGPGRWVVLAAVLIGLLLVLLGIGFLVWHLQYRDVRVQKVFNGYMRITNENFVDAYENSNSTEFVSLASKVKDALKLLYSGVPFLGPYHKESAVTAFSEGSVIAYYWSEFSIPQHLVEEAERVMAEERVVMLPPRARSLKSFVVTSVVAFPTDSKTVQRTQDNSCSFGLHARGVELMRFTTPGFPDSPYPAHARCQWALRGDADSVLSLTFRSFDLASCDERGSDLVTVYNTLSPMEPHALVQLCGTYPPSYNLTFHSSQNVLLITLITNTERRHPGFEATFFQLPRMSSCGGRLRKAQGTFNSPYYPGHYPPNIDCTWNIEVPNNQHVKVRFKFFYLLEPGVPAGTCPKDYVEINGEKYCGERSQFVVTSNSNKITVRFHSDQSYTDTGFLAEYLSYDSSDPCPGQFTCRTGRCIRKELRCDGWADCTDHSDELNCSCDAGHQFTCKNKFCKPLFWVCDSVNDCGDNSDEQGCSCPAQTFRCSNGKCLSKSQQCNGKDDCGDGSDEASCPKVNVVTCTKHTYRCLNGLCLSKGNPECDGKEDCSDGSDEKDCDCGLRSFTRQARVVGGTDADEGEWPWQVSLHALGQGHICGASLISPNWLVSAAHCYIDDRGFRYSDPTQWTAFLGLHDQSQRSAPGVQERRLKRIISHPFFNDFTFDYDIALLELEKPAEYSSMVRPICLPDASHVFPAGKATWVTGWGHTQYGGTGALILQKGEIRVIDQATCENLLPQQITPRMMCVGLLSGGVDSCQGDSGGPLSSVEADGRIFQAGVVSWGVGCAQRNKPGVYTRLPLFRDWIKENTGV

SEQ ID NO: 590 - protein, 855 aa, Homo sapiens
  Mutant MTSP1 full length; I41F
MGSDRARKGGGGPKDFGAGLKYNSRHEKVNGLEEGVEFLPVNNVKKVEKHGPGRWVVLAAVLIGLLLVLLGIGFLVWHLQYRDVRVQKVFNGYMRITNENFVDAYENSNSTEFVSLASKVKDALKLLYSGVPFLGPYHKESAVTAFSEGSVIAYYWSEFSIPQHLVEEAERVMAEERVVMLPPRARSLKSFVVTSVVAFPTDSKTVQRTQDNSCSFGLHARGVELMRFTTPGFPDSPYPAHARCQWALRGDADSVLSLTFRSFDLASCDERGSDLVTVYNTLSPMEPHALVQLCGTYPPSYNLTFHSSQNVLLITLITNTERRHPGFEATFFQLPRMSSCGGRLRKAQGTFNSPYYPGHYPPNIDCTWNIEVPNNQHVKVRFKFFYLLEPGVPAGTCPKDYVEINGEKYCGERSQFVVTSNSNKITVRFHSDQSYTDTGFLAEYLSYDSSDPCPGQFTCRTGRCIRKELRCDGWADCTDHSDELNCSCDAGHQFTCKNKFCKPLFWVCDSVNDCGDNSDEQGCSCPAQTFRCSNGKCLSKSQQCNGKDDCGDGSDEASCPKVNVVTCTKHTYRCLNGLCLSKGNPECDGKEDCSDGSDEKDCDCGLRSFTRQARVVGGTDADEGEWPWQVSLHALGQGHFCGASLISPNWLVSAAHCYIDDRGFRYSDPTQWTAFLGLHDQSQRSAPGVQERRLKRIISHPFFNDFTFDYDIALLELEKPAEYSSMVRPICLPDASHVFPAGKAIWVTGWGHTQYGGTGALILQKGEIRVINQTTCENLLPQQITPRMMCVGFLSGGVDSCQGDSGGPLSSVEADGRIFQAGVVSWGDGCAQRNKPGVYTRLPLFRDWIKENTGV

SEQ ID NO: 591 - protein, 855 aa, Homo sapiens
  Mutant MTSP1 full length; I41F/A126T/V244G
MGSDRARKGGGGPKDFGAGLKYNSRHEKVNGLEEGVEFLPVNNVKKVEKHGPGRWVVLAAVLIGLLLVLLGIGFLVWHLQYRDVRVQKVFNGYMRITNENFVDAYENSNSTEFVSLASKVKDALKLLYSGVPFLGPYHKESAVTAFSEGSVIAYYWSEFSIPQHLVEEAERVMAEERVVMLPPRARSLKSFVVTSVVAFPTDSKTVQRTQDNSCSFGLHARGVELMRFTTPGFPDSPYPAHARCQWALRGDADSVLSLTFRSFDLASCDERGSDLVTVYNTLSPMEPHALVQLCGTYPPSYNLTFHSSQNVLLITLITNTERRHPGFEATFFQLPRMSSCGGRLRKAQGTFNSPYYPGHYPPNIDCTWNIEVPNNQHVKVRFKFFYLLEPGVPAGTCPKDYVEINGEKYCGERSQFVVTSNSNKITVRFHSDQSYTDTGFLAEYLSYDSSDPCPGQFTCRTGRCIRKELRCDGWADCTDHSDELNCSCDAGHQFTCKNKFCKPLFWVCDSVNDCGDNSDEQGCSCPAQTFRCSNGKCLSKSQQCNGKDDCGDGSDEASCPKVNVVTCTKHTYRCLNGLCLSKGNPECDGKEDCSDGSDEKDCDCGLRSFTRQARVVGGTDADEGEWPWQVSLHALGQGHFCGASLISPNWLVSAAHCYIDDRGFRYSDPTQWTAFLGLHDQSQRSAPGVQERRLKRIISHPFFNDFTFDYDIALLELEKPAEYSSMVRPICLPDTSHVFPAGKAIWVTGWGHTQYGGTGALILQKGEIRVINQTTCENLLPQQITPRMMCVGFLSGGVDSCQGDSGGPLSSVEADGRIFQAGVVSWGDGCAQRNKPGVYTRLPLFRDWIKENTGG

SEQ ID NO: 592 - protein, 855 aa, Homo sapiens
  Mutant MTSP1 full length; D23E/I41F/T98P/T144I
MGSDRARKGGGGPKDFGAGLKYNSRHEKVNGLEEGVEFLPVNNVKKVEKHGPGRWVVLAAVLIGLLLVLLGIGFLVWHLQYRDVRVQKVFNGYMRITNENFVDAYENSNSTEFVSLASKVKDALKLLYSGVPFLGPYHKESAVTAFSEGSVIAYYWSEFSIPQHLVEEAERVMAEERVVMLPPRARSLKSFVVTSVVAFPTDSKTVQRTQDNSCSFGLHARGVELMRFTTPGFPDSPYPAHARCQWALRGDADSVLSLTFRSFDLASCDERGSDLVTVYNTLSPMEPHALVQLCGTYPPSYNLTFHSSQNVLLITLITNTERRHPGFEATFFQLPRMSSCGGRLRKAQGTFNSPYYPGHYPPNIDCTWNIEVPNNQHVKVRFKFFYLLEPGVPAGTCPKDYVEINGEKYCGERSQFVVTSNSNKITVRFHSDQSYTDTGFLAEYLSYDSSDPCPGQFTCRTGRCIRKELRCDGWADCTDHSDELNCSCDAGHQFTCKNKFCKPLFWVCDSVNDCGDNSDEQGCSCPAQTFRCSNGKCLSKSQQCNGKDDCGDGSDEASCPKVNVVTCTKHTYRCLNGLCLSKGNPECDGKEDCSDGSDEKDCDCGLRSFTRQARVVGGTDAEEGEWPWQVSLHALGQGHFCGASLISPNWLVSAAHCYIDDRGFRYSDPTQWTAFLGLHDQSQRSAPGVQERRLKRIISHPFFNDFPFDYDIALLELEKPAEYSSMVRPICLPDASHVFPAGKAIWVTGWGHIQYGGTGALILQKGEIRVINQTTCENLLPQQITPRMMCVGFLSGGVDSCQGDSGGPLSSVEADGRIFQAGVVSWGDGCAQRNKPGVYTRLPLFRDWIKENTGV

SEQ ID NO: 593 - protein, 855 aa, Homo sapiens; identical to SEQ ID NO: 590
  Mutant MTSP1 full length; I41F

SEQ ID NO: 594 - protein, 855 aa, Homo sapiens
  Mutant MTSP1 full length; I41F/L171F/V244G
MGSDRARKGGGGPKDFGAGLKYNSRHEKVNGLEEGVEFLPVNNVKKVEKHGPGRWVVLAAVLIGLLLVLLGIGFLVWHLQYRDVRVQKVFNGYMRITNENFVDAYENSNSTEFVSLASKVKDALKLLYSGVPFLGPYHKESAVTAFSEGSVIAYYWSEFSIPQHLVEEAERVMAEERVVMLPPRARSLKSFVVTSVVAFPTDSKTVQRTQDNSCSFGLHARGVELMRFTTPGFPDSPYPAHARCQWALRGDADSVLSLTFRSFDLASCDERGSDLVTVYNTLSPMEPHALVQLCGTYPPSYNLTFHSSQNVLLITLITNTERRHPGFEATFFQLPRMSSCGGRLRKAQGTFNSPYYPGHYPPNIDCTWNIEVPNNQHVKVRFKFFYLLEPGVPAGTCPKDYVEINGEKYCGERSQFVVTSNSNKITVRFHSDQSYTDTGFLAEYLSYDSSDPCPGQFTCRTGRCIRKELRCDGWADCTDHSDELNCSCDAGHQFTCKNKFCKPLFWVCDSVNDCGDNSDEQGCSCPAQTFRCSNGKCLSKSQQCNGKDDCGDGSDEASCPKVNVVTCTKHTYRCLNGLCLSKGNPECDGKEDCSDGSDEKDCDCGLRSFTRQARVVGGTDADEGEWPWQVSLHALGQGHFCGASLISPNWLVSAAHCYIDDRGFRYSDPTQWTAFLGLHDQSQRSAPGVQERRLKRIISHPFFNDFTFDYDIALLELEKPAEYSSMVRPICLPDASHVFPAGKAIWVTGWGHTQYGGTGALILQKGEIRVINQTTCENFLPQQITPRMMCVGFLSGGVDSCQGDSGGPLSSVEADGRIFQAGVVSWGDGCAQRNKPGVYTRLPLFRDWIKENTGG

SEQ ID NO: 595 - protein, 855 aa, Homo sapiens
  Mutant MTSP1 full length; H143R/Q175R
MGSDRARKGGGGPKDFGAGLKYNSRHEKVNGLEEGVEFLPVNNVKKVEKHGPGRWVVLAAVLIGLLLVLLGIGFLVWHLQYRDVRVQKVFNGYMRITNENFVDAYENSNSTEFVSLASKVKDALKLLYSGVPFLGPYHKESAVTAFSEGSVIAYYWSEFSIPQHLVEEAERVMAEERVVMLPPRARSLKSFVVTSVVAFPTDSKTVQRTQDNSCSFGLHARGVELMRFTTPGFPDSPYPAHARCQWALRGDADSVLSLTFRSFDLASCDERGSDLVTVYNTLSPMEPHALVQLCGTYPPSYNLTFHSSQNVLLITLITNTERRHPGFEATFFQLPRMSSCGGRLRKAQGTFNSPYYPGHYPPNIDCTWNIEVPNNQHVKVRFKFFYLLEPGVPAGTCPKDYVEINGEKYCGERSQFVVTSNSNKITVRFHSDQSYTDTGFLAEYLSYDSSDPCPGQFTCRTGRCIRKELRCDGWADCTDHSDELNCSCDAGHQFTCKNKFCKPLFWVCDSVNDCGDNSDEQGCSCPAQTFRCSNGKCLSKSQQCNGKDDCGDGSDEASCPKVNVVTCTKHTYRCLNGLCLSKGNPECDGKEDCSDGSDEKDCDCGLRSFTRQARVVGGTDADEGEWPWQVSLHALGQGHICGASLISPNWLVSAAHCYIDDRGFRYSDPTQWTAFLGLHDQSQRSAPGVQERRLKRIISHPFFNDFTFDYDIALLELEKPAEYSSMVRPICLPDASHVFPAGKAIWVTGWGRTQYGGTGALILQKGEIRVINQTTCENLLPQRITPRMMCVGFLSGGVDSCQGDSGGPLSSVEADGRIFQAGVVSWGDGCAQRNKPGVYTRLPLFRDWIKENTGV

SEQ ID NO: 596 - protein, 855 aa, Homo sapiens
  Mutant MTSP1 full length; I41F/L171F
MGSDRARKGGGGPKDFGAGLKYNSRHEKVNGLEEGVEFLPVNNVKKVEKHGPGRWVVLAAVLIGLLLVLLGIGFLVWHLQYRDVRVQKVFNGYMRITNENFVDAYENSNSTEFVSLASKVKDALKLLYSGVPFLGPYHKESAVTAFSEGSVIAYYWSEFSIPQHLVEEAERVMAEERVVMLPPRARSLKSFVVTSVVAFPTDSKTVQRTQDNSCSFGLHARGVELMRFTTPGFPDSPYPAHARCQWALRGDADSVLSLTFRSFDLASCDERGSDLVTVYNTLSPMEPHALVQLCGTYPPSYNLTFHSSQNVLLITLITNTERRHPGFEATFFQLPRMSSCGGRLRKAQGTFNSPYYPGHYPPNIDCTWNIEVPNNQHVKVRFKFFYLLEPGVPAGTCPKDYVEINGEKYCGERSQFVVTSNSNKITVRFHSDQSYTDTGFLAEYLSYDSSDPCPGQFTCRTGRCIRKELRCDGWADCTDHSDELNCSCDAGHQFTCKNKFCKPLFWVCDSVNDCGDNSDEQGCSCPAQTFRCSNGKCLSKSQQCNGKDDCGDGSDEASCPKVNVVTCTKHTYRCLNGLCLSKGNPECDGKEDCSDGSDEKDCDCGLRSFTRQARVVGGTDADEGEWPWQVSLHALGQGHFCGASLISPNWLVSAAHCYIDDRGFRYSDPTQWTAFLGLHDQSQRSAPGVQERRLKRIISHPFFNDFTFDYDIALLELEKPAEYSSMVRPICLPDASHVFPAGKAIWVTGWGHTQYGGTGALILQKGEIRVINQTTCENFLPQQITPRMMCVGFLSGGVDSCQGDSGGPLSSVEADGRIFQAGVVSWGDGCAQRNKPGVYTRLPLFRDWIKENTGV

SEQ ID NO: 597 - protein, 855 aa, Homo sapiens [sequence omitted]

SEQ ID NO: 598 - protein, 855 aa, Homo sapiens
  Mutant MTSP1 full length; I41F/I154V/V244G
MGSDRARKGGGGPKDFGAGLKYNSRHEKVNGLEEGVEFLPVNNVKKVEKHGPGRWVVLAAVLIGLLLVLLGIGFLVWHLQYRDVRVQKVFNGYMRITNENFVDAYENSNSTEFVSLASKVKDALKLLYSGVPFLGPYHKESAVTAFSEGSVIAYYWSEFSIPQHLVEEAERVMAEERVVMLPPRARSLKSFVVTSVVAFPTDSKTVQRTQDNSCSFGLHARGVELMRFTTPGFPDSPYPAHARCQWALRGDADSVLSLTFRSFDLASCDERGSDLVTVYNTLSPMEPHALVQLCGTYPPSYNLTFHSSQNVLLITLITNTERRHPGFEATFFQLPRMSSCGGRLRKAQGTFNSPYYPGHYPPNIDCTWNIEVPNNQHVKVRFKFFYLLEPGVPAGTCPKDYVEINGEKYCGERSQFVVTSNSNKITVRFHSDQSYTDTGFLAEYLSYDSSDPCPGQFTCRTGRCIRKELRCDGWADCTDHSDELNCSCDAGHQFTCKNKFCKPLFWVCDSVNDCGDNSDEQGCSCPAQTFRCSNGKCLSKSQQCNGKDDCGDGSDEASCPKVNVVTCTKHTYRCLNGLCLSKGNPECDGKEDCSDGSDEKDCDCGLRSFTRQARVVGGTDADEGEWPWQVSLHALGQGHFCGASLISPNWLVSAAHCYIDDRGFRYSDPTQWTAFLGLHDQSQRSAPGVQERRLKRIISHPFFNDFTFDYDIALLELEKPAEYSSMVRPICLPDASHVFPAGKAIWVTGWGHTQYGGTGALVLQKGEIRVINQTTCENLLPQQITPRMMCVGFLSGGVDSCQGDSGGPLSSVEADGRIFQAGVVSWGDGCAQRNKPGVYTRLPLFRDWIKENTGG

SEQ ID NO: 599 - protein, 855 aa, Homo sapiens
  Mutant MTSP1 full length; I141F/L52M/V129D/Q221(A)L
MGSDRARKGGGGPKDFGAGLKYNSRHEKVNGLEEGVEFLPVNNVKKVEKHGPGRWVVLAAVLIGLLLVLLGIGFLVWHLQYRDVRVQKVFNGYMRITNENFVDAYENSNSTEFVSLASKVKDALKLLYSGVPFLGPYHKESAVTAFSEGSVIAYYWSEFSIPQHLVEEAERVMAEERVVMLPPRARSLKSFVVTSVVAFPTDSKTVQRTQDNSCSFGLHARGVELMRFTTPGFPDSPYPAHARCQWALRGDADSVLSLTFRSFDLASCDERGSDLVTVYNTLSPMEPHALVQLCGTYPPSYNLTFHSSQNVLLITLITNTERRHPGFEATFFQLPRMSSCGGRLRKAQGTFNSPYYPGHYPPNIDCTWNIEVPNNQHVKVRFKFFYLLEPGVPAGTCPKDYVEINGEKYCGERSQFVVTSNSNKITVRFHSDQSYTDTGFLAEYLSYDSSDPCPGQFTCRTGRCIRKELRCDGWADCTDHSDELNCSCDAGHQFTCKNKFCKPLFWVCDSVNDCGDNSDEQGCSCPAQTFRCSNGKCLSKSQQCNGKDDCGDGSDEASCPKVNVVTCTKHTYRCLNGLCLSKGNPECDGKEDCSDGSDEKDCDCGLRSFTRQARVVGGTDADEGEWPWQVSLHALGQGHFCGASLISPNWMVSAAHCYIDDRGFRYSDPTQWTAFLGLHDQSQRSAPGVQERRLKRIISHPFFNDFTFDYDIALLELEKPAEYSSMVRPICLPDASHDFPAGKAIWVTGWGHTQYGGTGALILQKGEIRVINQTTCENLLPQQITPRMMCVGFLSGGVDSCQGDSGGPLSSVEADGRIFQAGVVSWGDGCALRNKPGVYTRLPLFRDWIKENTGV

SEQ ID NO: 600 - protein, 855 aa, Homo sapiens
  Mutant MTSP1 full length; F99L
MGSDRARKGGGGPKDFGAGLKYNSRHEKVNGLEEGVEFLPVNNVKKVEKHGPGRWVVLAAVLIGLLLVLLGIGFLVWHLQYRDVRVQKVFNGYMRITNENFVDAYENSNSTEFVSLASKVKDALKLLYSGVPFLGPYHKESAVTAFSEGSVIAYYWSEFSIPQHLVEEAERVMAEERVVMLPPRARSLKSFVVTSVVAFPTDSKTVQRTQDNSCSFGLHARGVELMRFTTPGFPDSPYPAHARCQWALRGDADSVLSLTFRSFDLASCDERGSDLVTVYNTLSPMEPHALVQLCGTYPPSYNLTFHSSQNVLLITLITNTERRHPGFEATFFQLPRMSSCGGRLRKAQGTFNSPYYPGHYPPNIDCTWNIEVPNNQHVKVRFKFFYLLEPGVPAGTCPKDYVEINGEKYCGERSQFVVTSNSNKITVRFHSDQSYTDTGFLAEYLSYDSSDPCPGQFTCRTGRCIRKELRCDGWADCTDHSDELNCSCDAGHQFTCKNKFCKPLFWVCDSVNDCGDNSDEQGCSCPAQTFRCSNGKCLSKSQQCNGKDDCGDGSDEASCPKVNVVTCTKHTYRCLNGLCLSKGNPECDGKEDCSDGSDEKDCDCGLRSFTRQARVVGGTDADEGEWPWQVSLHALGQGHICGASLISPNWLVSAAHCYIDDRGFRYSDPTQWTAFLGLHDQSQRSAPGVQERRLKRIISHPFFNDFTLDYDIALLELEKPAEYSSMVRPICLPDASHVFPAGKAIWVTGWGHTQYGGTGALILQKGEIRVINQTTCENLLPQQITPRMMCVGFLSGGVDSCQGDSGGPLSSVEADGRIFQAGVVSWGDGCAQRNKPGVYTRLPLFRDWIKENTGV

SEQ ID NO: 601 - protein, 855 aa, Homo sapiens
  Mutant MTSP1 full length; F97Y/I136V/Q192H/S201I
MGSDRARKGGGGPKDFGAGLKYNSRHEKVNGLEEGVEFLPVNNVKKVEKHGPGRWVVLAAVLIGLLLVLLGIGFLVWHLQYRDVRVQKVFNGYMRITNENFVDAYENSNSTEFVSLASKVKDALKLLYSGVPFLGPYHKESAVTAFSEGSVIAYYWSEFSIPQHLVEEAERVMAEERVVMLPPRARSLKSFVVTSVVAFPTDSKTVQRTQDNSCSFGLHARGVELMRFTTPGFPDSPYPAHARCQWALRGDADSVLSLTFRSFDLASCDERGSDLVTVYNTLSPMEPHALVQLCGTYPPSYNLTFHSSQNVLLITLITNTERRHPGFEATFFQLPRMSSCGGRLRKAQGTFNSPYYPGHYPPNIDCTWNIEVPNNQHVKVRFKFFYLLEPGVPAGTCPKDYVEINGEKYCGERSQFVVTSNSNKITVRFHSDQSYTDTGFLAEYLSYDSSDPCPGQFTCRTGRCIRKELRCDGWADCTDHSDELNCSCDAGHQFTCKNKFCKPLFWVCDSVNDCGDNSDEQGCSCPAQTFRCSNGKCLSKSQQCNGKDDCGDGSDEASCPKVNVVTCTKHTYRCLNGLCLSKGNPECDGKEDCSDGSDEKDCDCGLRSFTRQARVVGGTDADEGEWPWQVSLHALGQGHICGASLISPNWLVSAAHCYIDDRGFRYSDPTQWTAFLGLHDQSQRSAPGVQERRLKRIISHPFFNDYTFDYDIALLELEKPAEYSSMVRPICLPDASHVFPAGKAVWVTGWGHTQYGGTGALILQKGEIRVINQTTCENLLPQQITPRMMCVGFLSGGVDSCHGDSGGPLSIVEADGRIFQAGVVSWGDGCAQRNKPGVYTRLPLFRDWIKENTGV

SEQ ID NO: 602 - protein, 855 aa, Homo sapiens
  Mutant MTSP1 full length; H71R/P131S/D217V
MGSDRARKGGGGPKDFGAGLKYNSRHEKVNGLEEGVEFLPVNNVKKVEKHGPGRWVVLAAVLIGLLLVLLGIGFLVWHLQYRDVRVQKVFNGYMRITNENFVDAYENSNSTEFVSLASKVKDALKLLYSGVPFLGPYHKESAVTAFSEGSVIAYYWSEFSIPQHLVEEAERVMAEERVVMLPPRARSLKSFVVTSVVAFPTDSKTVQRTQDNSCSFGLHARGVELMRFTTPGFPDSPYPAHARCQWALRGDADSVLSLTFRSFDLASCDERGSDLVTVYNTLSPMEPHALVQLCGTYPPSYNLTFHSSQNVLLITLITNTERRHPGFEATFFQLPRMSSCGGRLRKAQGTFNSPYYPGHYPPNIDCTWNIEVPNNQHVKVRFKFFYLLEPGVPAGTCPKDYVEINGEKYCGERSQFVVTSNSNKITVRFHSDQSYTDTGFLAEYLSYDSSDPCPGQFTCRTGRCIRKELRCDGWADCTDHSDELNCSCDAGHQFTCKNKFCKPLFWVCDSVNDCGDNSDEQGCSCPAQTFRCSNGKCLSKSQQCNGKDDCGDGSDEASCPKVNVVTCTKHTYRCLNGLCLSKGNPECDGKEDCSDGSDEKDCDCGLRSFTRQARVVGGTDADEGEWPWQVSLHALGQGHICGASLISPNWLVSAAHCYIDDRGFRYSDPTQWTAFLGLRDQSQRSAPGVQERRLKRIISHPFFNDFTFDYDIALLELEKPAEYSSMVRPICLPDASHVFSAGKAIWVTGWGHTQYGGTGALILQKGEIRVINQTTCENLLPQQITPRMMCVGFLSGGVDSCQGDSGGPLSSVEADGRIFQAGVVSWGVGCAQRNKPGVYTRLPLFRDWIKENTGV

SEQ ID NO: 603 - protein, 855 aa, Homo sapiens
  Mutant MTSP1 full length; D217V
MGSDRARKGGGGPKDFGAGLKYNSRHEKVNGLEEGVEFLPVNNVKKVEKHGPGRWVVLAAVLIGLLLVLLGIGFLVWHLQYRDVRVQKVFNGYMRITNENFVDAYENSNSTEFVSLASKVKDALKLLYSGVPFLGPYHKESAVTAFSEGSVIAYYWSEFSIPQHLVEEAERVMAEERVVMLPPRARSLKSFVVTSVVAFPTDSKTVQRTQDNSCSFGLHARGVELMRFTTPGFPDSPYPAHARCQWALRGDADSVLSLTFRSFDLASCDERGSDLVTVYNTLSPMEPHALVQLCGTYPPSYNLTFHSSQNVLLITLITNTERRHPGFEATFFQLPRMSSCGGRLRKAQGTFNSPYYPGHYPPNIDCTWNIEVPNNQHVKVRFKFFYLLEPGVPAGTCPKDYVEINGEKYCGERSQFVVTSNSNKITVRFHSDQSYTDTGFLAEYLSYDSSDPCPGQFTCRTGRCIRKELRCDGWADCTDHSDELNCSCDAGHQFTCKNKFCKPLFWVCDSVNDCGDNSDEQGCSCPAQTFRCSNGKCLSKSQQCNGKDDCGDGSDEASCPKVNVVTCTKHTYRCLNGLCLSKGNPECDGKEDCSDGSDEKDCDCGLRSFTRQARVVGGTDADEGEWPWQVSLHALGQGHICGASLISPNWLVSAAHCYIDDRGFRYSDPTQWTAFLGLHDQSQRSAPGVQERRLKRIISHPFFNDFTFDYDIALLELEKPAEYSSMVRPICLPDASHVFPAGKAIWVTGWGHTQYGGTGALILQKGEIRVINQTTCENLLPQQITPRMMCVGFLSGGVDSCQGDSGGPLSSVEADGRIFQAGVVSWGVGCAQRNKPGVYTRLPLFRDWIKENTGV

SEQ ID NO: 604 - protein, 855 aa, Homo sapiens
  Mutant MTSP1 full length; T65K/F93L/F97Y/D217V
MGSDRARKGGGGPKDFGAGLKYNSRHEKVNGLEEGVEFLPVNNVKKVEKHGPGRWVVLAAVLIGLLLVLLGIGFLVWHLQYRDVRVQKVFNGYMRITNENFVDAYENSNSTEFVSLASKVKDALKLLYSGVPFLGPYHKESAVTAFSEGSVIAYYWSEFSIPQHLVEEAERVMAEERVVMLPPRARSLKSFVVTSVVAFPTDSKTVQRTQDNSCSFGLHARGVELMRFTTPGFPDSPYPAHARCQWALRGDADSVLSLTFRSFDLASCDERGSDLVTVYNTLSPMEPHALVQLCGTYPPSYNLTFHSSQNVLLITLITNTERRHPGFEATFFQLPRMSSCGGRLRKAQGTFNSPYYPGHYPPNIDCTWNIEVPNNQHVKVRFKFFYLLEPGVPAGTCPKDYVEINGEKYCGERSQFVVTSNSNKITVRFHSDQSYTDTGFLAEYLSYDSSDPCPGQFTCRTGRCIRKELRCDGWADCTDHSDELNCSCDAGHQFTCKNKFCKPLFWVCDSVNDCGDNSDEQGCSCPAQTFRCSNGKCLSKSQQCNGKDDCGDGSDEASCPKVNVVTCTKHTYRCLNGLCLSKGNPECDGKEDCSDGSDEKDCDCGLRSFTRQARVVGGTDADEGEWPWQVSLHALGQGHICGASLISPNWLVSAAHCYIDDRGFRYSDPTQWKAFLGLHDQSQRSAPGVQERRLKRIISHPLFNDYTFDYDIALLELEKPAEYSSMVRPICLPDASHVFPAGKAIWVTGWGHTQYGGTGALILQKGEIRVINQTTCENLLPQQITPRMMCVGFLSGGVDSCQGDSGGPLSSVEADGRIFQAGVVSWGVGCAQRNKPGVYTRLPLFRDWIKENTGV

SEQ ID NO: 605 - protein, 855 aa, Homo sapiens
  Mutant MTSP1 full length; I41T/P173S/Q209L
MGSDRARKGGGGPKDFGAGLKYNSRHEKVNGLEEGVEFLPVNNVKKVEKHGPGRWVVLAAVLIGLLLVLLGIGFLVWHLQYRDVRVQKVFNGYMRITNENFVDAYENSNSTEFVSLASKVKDALKLLYSGVPFLGPYHKESAVTAFSEGSVIAYYWSEFSIPQHLVEEAERVMAEERVVMLPPRARSLKSFVVTSVVAFPTDSKTVQRTQDNSCSFGLHARGVELMRFTTPGFPDSPYPAHARCQWALRGDADSVLSLTFRSFDLASCDERGSDLVTVYNTLSPMEPHALVQLCGTYPPSYNLTFHSSQNVLLITLITNTERRHPGFEATFFQLPRMSSCGGRLRKAQGTFNSPYYPGHYPPNIDCTWNIEVPNNQHVKVRFKFFYLLEPGVPAGTCPKDYVEINGEKYCGERSQFVVTSNSNKITVRFHSDQSYTDTGFLAEYLSYDSSDPCPGQFTCRTGRCIRKELRCDGWADCTDHSDELNCSCDAGHQFTCKNKFCKPLFWVCDSVNDCGDNSDEQGCSCPAQTFRCSNGKCLSKSQQCNGKDDCGDGSDEASCPKVNVVTCTKHTYRCLNGLCLSKGNPECDGKEDCSDGSDEKDCDCGLRSFTRQARVVGGTDADEGEWPWQVSLHALGQGHTCGASLISPNWLVSAAHCYIDDRGFRYSDPTQWTAFLGLHDQSQRSAPGVQERRLKRIISHPFFNDFTFDYDIALLELEKPAEYSSMVRPICLPDASHVFPAGKAIWVTGWGHTQYGGTGALILQKGEIRVINQTTCENLLSQQITPRMMCVGFLSGGVDSCQGDSGGPLSSVEADGRIFLAGVVSWGDGCAQRNKPGVYTRLPLFRDWIKENTGV

SEQ ID NO: 606 - protein, 855 aa, Homo sapiens
  Mutant MTSP1 full length; F97L//F234L
MGSDRARKGGGGPKDFGAGLKYNSRHEKVNGLEEGVEFLPVNNVKKVEKHGPGRWVVLAAVLIGLLLVLLGIGFLVWHLQYRDVRVQKVFNGYMRITNENFVDAYENSNSTEFVSLASKVKDALKLLYSGVPFLGPYHKESAVTAFSEGSVIAYYWSEFSIPQHLVEEAERVMAEERVVMLPPRARSLKSFVVTSVVAFPTDSKTVQRTQDNSCSFGLHARGVELMRFTTPGFPDSPYPAHARCQWALRGDADSVLSLTFRSFDLASCDERGSDLVTVYNTLSPMEPHALVQLCGTYPPSYNLTFHSSQNVLLITLITNTERRHPGFEATFFQLPRMSSCGGRLRKAQGTFNSPYYPGHYPPNIDCTWNIEVPNNQHVKVRFKFFYLLEPGVPAGTCPKDYVEINGEKYCGERSQFVVTSNSNKITVRFHSDQSYTDTGFLAEYLSYDSSDPCPGQFTCRTGRCIRKELRCDGWADCTDHSDELNCSCDAGHQFTCKNKFCKPLFWVCDSVNDCGDNSDEQGCSCPAQTFRCSNGKCLSKSQQCNGKDDCGDGSDEASCPKVNVVTCTKHTYRCLNGLCLSKGNPECDGKEDCSDGSDEKDCDCGLRSFTRQARVVGGTDADEGEWPWQVSLHALGQGHICGASLISPNWLVSAAHCYIDDRGFRYSDPTQWTAFLGLHDQSQRSAPGVQERRLKRIISHPLFNDFTFDYDIALLELEKPAEYSSMVRPICLPDASHVFPAGKAIWVTGWGHTQYGGTGALILQKGEIRVINQTTCENLLPQQITPRMMCVGFLSGGVDSCQGDSGGPLSSVEADGRIFQAGVVSWGDGCAQRNKPGVYTRLPLLRDWIKENTGV

SEQ ID NO: 607 - protein, 855 aa, Homo sapiens [sequence omitted]

SEQ ID NO: 608 - protein, 855 aa, Homo sapiens
  Mutant MTSP1 full length; N95K
MGSDRARKGGGGPKDFGAGLKYNSRHEKVNGLEEGVEFLPVNNVKKVEKHGPGRWVVLAAVLIGLLLVLLGIGFLVWHLQYRDVRVQKVFNGYMRITNENFVDAYENSNSTEFVSLASKVKDALKLLYSGVPFLGPYHKESAVTAFSEGSVIAYYWSEFSIPQHLVEEAERVMAEERVVMLPPRARSLKSFVVTSVVAFPTDSKTVQRTQDNSCSFGLHARGVELMRFTTPGFPDSPYPAHARCQWALRGDADSVLSLTFRSFDLASCDERGSDLVTVYNTLSPMEPHALVQLCGTYPPSYNLTFHSSQNVLLITLITNTERRHPGFEATFFQLPRMSSCGGRLRKAQGTFNSPYYPGHYPPNIDCTWNIEVPNNQHVKVRFKFFYLLEPGVPAGTCPKDYVEINGEKYCGERSQFVVTSNSNKITVRFHSDQSYTDTGFLAEYLSYDSSDPCPGQFTCRTGRCIRKELRCDGWADCTDHSDELNCSCDAGHQFTCKNKFCKPLFWVCDSVNDCGDNSDEQGCSCPAQTFRCSNGKCLSKSQQCNGKDDCGDGSDEASCPKVNVVTCTKHTYRCLNGLCLSKGNPECDGKEDCSDGSDEKDCDCGLRSFTRQARVVGGTDADEGEWPWQVSLHALGQGHICGASLISPNWLVSAAHCYIDDRGFRYSDPTQWTAFLGLHDQSQRSAPGVQERRLKRIISHPFFKDFTFDYDIALLELEKPAEYSSMVRPICLPDASHVFPAGKAIWVTGWGHTQYGGTGALILQKGEIRVINQTTCENLLPQQITPRMMCVGFLSGGVDSCQGDSGGPLSSVEADGRIFQAGVVSWGDGCAQRNKPGVYTRLPLFRDWIKENTGV

SEQ ID NO: 609 - protein, 855 aa, Homo sapiens
  Mutant MTSP1 full length; Y60(G)S
MGSDRARKGGGGPKDFGAGLKYNSRHEKVNGLEEGVEFLPVNNVKKVEKHGPGRWVVLAAVLIGLLLVLLGIGFLVWHLQYRDVRVQKVFNGYMRITNENFVDAYENSNSTEFVSLASKVKDALKLLYSGVPFLGPYHKESAVTAFSEGSVIAYYWSEFSIPQHLVEEAERVMAEERVVMLPPRARSLKSFVVTSVVAFPTDSKTVQRTQDNSCSFGLHARGVELMRFTTPGFPDSPYPAHARCQWALRGDADSVLSLTFRSFDLASCDERGSDLVTVYNTLSPMEPHALVQLCGTYPPSYNLTFHSSQNVLLITLITNTERRHPGFEATFFQLPRMSSCGGRLRKAQGTFNSPYYPGHYPPNIDCTWNIEVPNNQHVKVRFKFFYLLEPGVPAGTCPKDYVEINGEKYCGERSQFVVTSNSNKITVRFHSDQSYTDTGFLAEYLSYDSSDPCPGQFTCRTGRCIRKELRCDGWADCTDHSDELNCSCDAGHQFTCKNKFCKPLFWVCDSVNDCGDNSDEQGCSCPAQTFRCSNGKCLSKSQQCNGKDDCGDGSDEASCPKVNVVTCTKHTYRCLNGLCLSKGNPECDGKEDCSDGSDEKDCDCGLRSFTRQARVVGGTDADEGEWPWQVSLHALGQGHICGASLISPNWLVSAAHCYIDDRGFRSSDPTQWTAFLGLHDQSQRSAPGVQERRLKRIISHPFFNDFTFDYDIALLELEKPAEYSSMVRPICLPDASHVFPAGKAIWVTGWGHTQYGGTGALILQKGEIRVINQTTCENLLPQRITPRMMCVGFLSGGVDSCQGDSGGPLSSVEADGRIFQAGVVSWGDGCAQRNKPGVYTRLPLFRDWIKENTGV

SEQ ID NO: 610 - protein, 380 aa, Homo sapiens
  Mutant mature PAI-1; PAI-1/RRAR
MVHHPPSYVAHLASDFGVRVFQQVAQASKDRNVVFSPYGVASVLAMLQLTTGGETQQQIQAAMGFKIDDKGMAPALRHLYKELMGPWNKDEISTTDAIFVQRDLKLVQGFMPHFFRLFRSTVKQVDFSEVERARFIINDWVKTHTKGMISNLLGKGAVDQLTRLVLVNALYFNGQWKTPFPDSSTHRRLFHKSDGSTVSVPMMAQTNKFNYTEFTTPDGHYYDILELPYHGDTLSMFIAAPYEKEVPLSALTNILSAQLISHWKGNMTRLPRLLVLPKFSLETEVDLRKPLENLGMTDMFRQFQADFTSLSDQEPLHVAQALQKVKIEVNESGTVASSSTAVIRRARMAPEEIIMDRPFLFVVRHNPTGTVLFMGQVMEP

SEQ ID NO: 611 - protein, 380 aa, Homo sapiens
  Mutant mature PAI-1; PAI-1/69 (containing PFGRS)
MVHHPPSYVAHLASDFGVRVFQQVAQASKDRNVVFSPYGVASVLAMLQLTTGGETQQQIQAAMGFKIDDKGMAPALRHLYKELMGPWNKDEISTTDAIFVQRDLKLVQGFMPHFFRLFRSTVKQVDFSEVERARFIINDWVKTHTKGMISNLLGKGAVDQLTRLVLVNALYFNGQWKTPFPDSSTHRRLFHKSDGSTVSVPMMAQTNKFNYTEFTTPDGHYYDILELPYHGDTLSMFIAAPYEKEVPLSALTNILSAQLISHWKGNMTRLPRLLVLPKFSLETEVDLRKPLENLGMTDMFRQFQADFTSLSDQEPLHVAQALQKVKIEVNESGTVASSSTAVIPFGRSAPEEIIMDRPFLFVVRHNPTGTVLFMGQVMEP

SEQ ID NO: 612 - DNA, 1395 bp, Homo sapiens
  ATIII
atgtattccaatgtgataggaactgtaacctctggaaaaaggaaggtttatcttttgtccttgctgctcattggcttctgggactgcgtgacctgtcacgggagccctgtggacatctgcacagccaagccgcgggacattcccatgaatcccatgtgcatttaccgctccccggagaagaaggcaactgaggatgagggctcagaacagaagatcccggaggccaccaaccggcgtgtctgggaactgtccaaggccaattcccgctttgctaccactttctatcagcacctggcagattccaagaatgacaatgataacattttcctgtcacccctgagtatctccacggcttttgctatgaccaagctgggtgcctgtaatgacaccctccagcaactgatggaggtatttaagtttgacaccatatctgagaaaacatctgatcagatccacttcttctttgccaaactgaactgccgactctatcgaaaagccaacaaatcctccaagttagtatcagccaatcgcctttttggagacaaatcccttaccttcaatgagacctaccaggacatcagtgagttggtatatggagccaagctccagcccctggacttcaaggaaaatgcagagcaatccagagcggccatcaacaaatgggtgtccaataagaccgaaggccgaatcaccgatgtcattccctcggaagccatcaatgagctcactgttctggtgctggttaacaccatttacttcaagggcctgtggaagtcaaagttcagccctgagaacacaaggaaggaactgttctacaaggctgatggagagtcgtgttcagcatctatgatgtaccaggaaggcaagttccgttatcggcgcgtggctgaaggcacccaggtgcttgagttgcccttcaaaggtgatgacatcaccatggtcctcatcttgcccaagcctgagaagagcctggccaaggtggagaaggaactcaccccagaggtgctgcaggagtggctggatgaattggaggagatgatgctggtggtccacatgccccgcttccgcattgaggacggcttcagtttgaaggagcagctgcaagacatgggccttgtcgatctgttcagccctgaaaagtccaaactcccaggtattgttgcagaaggccgagatgacctctatgtctcagatgcattccataaggcatttcttgaggtaaatgaagaaggcagtgaagcagctgcaagtaccgctgttgtgattgctggccgttcgctaaaccccaacagggtgactttcaaggccaacaggcctttcctggtttttataagagaagttcctctgaacactattatcttcatgggcagagtagccaacccttgtgttaagtaa

SEQ ID NO: 613 - DNA, 1458 bp, Artificial Sequence
  AT3 His tag fusion protein
atgctactagtaaatcagtcacaccaaggcttcaataaggaacacacaagcaagatggtaagcgctattgttttatatgtgcttttggcggcggcggcgcattctgcctttgcggcggatcttggatcccacgggagccctgtggacatctgcacagccaagccgcgggacattcccatgaatcccatgtgcatttaccgctccccggagaagaaggcaactgaggatgagggctcagaacagaagatcccggaggccaccaaccggcgtgtctgggaactgtccaaggccaattcccgctttgctaccactttctatcagcacctggcagattccaagaatgacaatgataacattttcctgtcacccctgagtatctccacggcttttgctatgaccaagctgggtgcctgtaatgacaccctccagcaactgatggaggtatttaagtttgacaccatatctgagaaaacatctgatcagatccacttcttctttgccaaactgaactgccgactctatcgaaaagccaacaaatcctccaagttagtatcagccaatcgcctttttggagacaaatcccttaccttcaatgagacctaccaggacatcagtgagttggtatatggagccaagctccagcccctggacttcaaggaaaatgcagagcaatccagagcggccatcaacaaatgggtgtccaataagaccgaaggccgaatcaccgatgtcattccctcggaagccatcaatgagctcactgttctggtgctggttaacaccatttacttcaagggcctgtggaagtcaaagttcagccctgagaacacaaggaaggaactgttctacaaggctgatggagagtcgtgttcagcatctatgatgtaccaggaaggcaagttccgttatcggcgcgtggctgaaggcacccaggtgcttgagttgcccttcaaaggtgatgacatcaccatggtcctcatcttgcccaagcctgagaagagcctggccaaggtagagaaggaactcaccccagaggtgctgcaagagtggctggatgaattggaggagatgatgctggtggtccacatgccccgcttccgcattgaggacggcttcagtttgaaggagcagctgcaagacatgggccttgtcgatctgttcagccctgaaaagtccaaactcccaggtattgttgcagaaggccgagatgacctctatgtctcagatgcattccataaggcatttcttgaggtaaatgaagaaggcagtgaagcagctgcaagtaccgctgttgtgattgctggccgttcgctaaaccccaacagggtgactttcaaggccaacaggcctttcctggtttttataagagaagttcctctgaacactattatcttcatgggcagagtagccaacccttgtgttaagggaggcggaagccatcaccaccatcaccactaa

SEQ ID NO: 614 - protein, 485 aa, Artificial Sequence
  AT3 His tag fusion protein
MLLVNQSHQGFNKEHTSKMVSAIVLYVLLAAAAHSAFAADLGSHGSPVDICTAKPRDIPMNPMCIYRSPEKKATEDEGSEQKIPEATNRRVWELSKANSRFATTFYQHLADSKNDNDNIFLSPLSISTAFAMTKLGACNDTLQQLMEVFKFDTISEKTSDQIHFFFAKLNCRLYRKANKSSKLVSANRLFGDKSLTFNETYQDISELVYGAKLQPLDFKENAEQSRAAINKWVSNKTEGRITDVIPSEAINELTVLVLVNTIYFKGLWKSKFSPENTRKELFYKADGESCSASMMYQEGKFRYRRVAEGTQVLELPFKGDDITMVLILPKPEKSLAKVEKELTPEVLQEWLDELEEMMLVVHMPRFRIEDGFSLKEQLQDMGLVDLFSPEKSKLPGIVAEGRDDLYVSDAFHKAFLEVNEEGSEAAASTAVVIAGRSLNPNRVTFKANRPFLVFIREVPLNTIIFMGRVANPCVKGGGSHHHHHH

SEQ ID NO: 615 - DNA, 6644 bp, Artificial Sequence
  pMal2c vector
ccgacaccatcgaatggtgcaaaacctttcgcggtatggcatgatagcgcccggaagagagtcaattcagggtggtgaatgtgaaaccagtaacgttatacgatgtcgcagagtatgccggtgtctcttatcagaccgtttcccgcgtggtgaaccaggccagccacgtttctgcgaaaacgcgggaaaaagtggaagcggcgatggcggagctgaattacattcccaaccgcgtggcacaacaactggcgggcaaacagtcgttgctgattggcgttgccacctccagtctggccctgcacgcgccgtcgcaaattgtcgcggcgattaaatctcgcgccgatcaactgggtgccagcgtggtggtgtcgatggtagaacgaagcggcgtcgaagcctgtaaagcggcggtgcacaatcttctcgcgcaacgcgtcagtgggctgatcattaactatccgctggatgaccaggatgccattgctgtggaagctgcctgcactaatgttccggcgttatttcttgatgtctctgaccagacacccatcaacagtattattttctcccatgaagacggtacgcgactgggcgtggagcatctggtcgcattgggtcaccagcaaatcgcgctgttagcgggcccattaagttctgtctcggcgcgtctgcgtctggctggctggcataaatatctcactcgcaatcaaattcagccgatagcggaacgggaaggcgactggagtgccatgtccggttttcaacaaaccatgcaaatgctgaatgagggcatcgttcccactgcgatgctggttgccaacgatcagatggcgctgggcgcaatgcgcgccattaccgagtccgggctgcgcgttggtgcggatatctcggtagtgggatacgacgataccgaagacagctcatgttatatcccgccgttaaccaccatcaaacaggattttcgcctgctggggcaaaccagcgtggaccgcttgctgcaactctctcagggccaggcggtgaagggcaatcagctgttgcccgtctcactggtgaaaagaaaaaccaccctggcgcccaatacgcaaaccgcctctccccgcgcgttggccgattcattaatgcagctggcacgacaggtttcccgactggaaagcgggcagtgagcgcaacgcaattaatgtaagttagctcactcattaggcacaattctcatgtttgacagcttatcatcgactgcacggtgcaccaatgcttctggcgtcaggcagccatcggaagctgtggtatggctgtgcaggtcgtaaatcactgcataattcgtgtcgctcaaggcgcactcccgttctggataatgttttttgcgccgacatcataacggttctggcaaatattctgaaatgagctgttgacaattaatcatcggctcgtataatgtgtggaattgtgagcggataacaatttcacacaggaaacagccagtccgtttaggtgttttcacgagcacttcaccaacaaggaccatagattatgaaaatcgaagaaggtaaactggtaatctggattaacggcgataaaggctataacggtctcgctgaagtcggtaagaaattcgagaaagataccggaattaaagtcaccgttgagcatccggataaactggaagagaaattcccacaggttgcggcaactggcgatggccctgacattatcttctgggcacacgaccgctttggtggctacgctcaatctggcctgttggctgaaatcaccccggacaaagcgttccaggacaagctgtatccgtttacctgggatgccgtacgttacaacggcaagctgattgcttacccgatcgctgttgaagcgttatcgctgatttataacaaagatctgctgccgaacccgccaaaaacctgggaagagatcccggcgctggataaagaactgaaagcgaaaggtaagagcgcgctgatgttcaacctgcaagaaccgtacttcacctggccgctgattgctgctgacgggggttatgcgttcaagtatgaaaacggcaagtacgacattaaagacgtgggcgtggataacgctggcgcgaaagcgggtctgaccttcctggttgacctgattaaaaacaaacacatgaatgcagacaccgattactccatcgcagaagctgcctttaataaaggcgaaacagcgatgaccatcaacggcccgtgggcatggtccaacatcgacaccagcaaagtgaattatggtgtaacggtactgccgaccttcaagggtcaaccatccaaaccgttcgttggcgtgctgagcgcaggtattaacgccgccagtccgaacaaagagctggcaaaagagttcctcgaaaactatctgctgactgatgaaggtctggaagcggttaataaagacaaaccgctgggtgccgtagcgctgaagtcttacgaggaagagttggcgaaagatccacgtattgccgccaccatggaaaacgcccagaaaggtgaaatcatgccgaacatcccgcagatgtccgctttctggtatgccgtgcgtactgcggtgatcaacgccgccagcggtcgtcagactgtcgatgaagccctgaaagacgcgcagactaattcgagctcgaacaacaacaacaataacaataacaacaacctcgggatcgagggaaggatttcagaattcggatcctctagagtcgacctgcaggcaagcttggcactggccgtcgttttacaacgtcgtgactgggaaaaccctggcgttacccaacttaatcgccttgcagcacatccccctttcgccagctggcgtaatagcgaagaggcccgcaccgatcgcccttcccaacagttgcgcagcctgaatggcgaatggcagcttggctgttttggcggatgagataagattttcagcctgatacagattaaatcagaacgcagaagcggtctgataaaacagaatttgcctggcggcagtagcgcggtggtcccacctgaccccatgccgaactcagaagtgaaacgccgtagcgccgatggtagtgtggggtctccccatgcgagagtagggaactgccaggcatcaaataaaacgaaaggctcagtcgaaagactgggcctttcgttttatctgttgtttgtcggtgaacgctctcctgagtaggacaaatccgccgggagcggatttgaacgttgcgaagcaacggcccggagggtggcgggcaggacgcccgccataaactgccaggcatcaaattaagcagaaggccatcctgacggatggcctttttgcgtttctacaaactctttttgtttatttttctaaatacattcaaatatgtatccgctcatgagacaataaccctgataaatgcttcaataatattgaaaaaggaagagtatgagtattcaacatttccgtgtcgcccttattcccttttttgcggcattttgccttcctgtttttgctcacccagaaacgctggtgaaagtaaaagatgctgaagatcagttgggtgcacgagtgggttacatcgaactggatctcaacagcggtaagatccttgagagttttcgccccgaagaacgttctccaatgatgagcacttttaaagttctgctatgtggcgcggtattatcccgtgttgacgccgggcaagagcaactcggtcgccgcatacactattctcagaatgacttggttgagtactcaccagtcacagaaaagcatcttacggatggcatgacagtaagagaattatgcagtgctgccataaccatgagtgataacactgcggccaacttacttctgacaacgatcggaggaccgaaggagctaaccgcttttttgcacaacatgggggatcatgtaactcgccttgatcgttgggaaccggagctgaatgaagccataccaaacgacgagcgtgacaccacgatgcctgtagcaatggcaacaacgttgcgcaaactattaactggcgaactacttactctagcttcccggcaacaattaatagactggatggaggcggataaagttgcaggaccacttctgcgctcggcccttccggctggctggtttattgctgataaatctggagccggtgagcgtgggtctcgcggtatcattgcagcactggggccagatggtaagccctcccgtatcgtagttatctacacgacggggagtcaggcaactatggatgaacgaaatagacagatcgctgagataggtgcctcactgattaagcattggtaactgtcagaccaagtttactcatatatactttagattgatttaccccggttgataatcagaaaagccccaaaaacaggaagattgtataagcaaatatttaaattgtaaacgttaatattttgttaaaattcgcgttaaatttttgttaaatcagctcattttttaaccaataggccgaaatcggcaaaatcccttataaatcaaaagaatagcccgagatagggttgagtgttgttccagtttggaacaagagtccactattaaagaacgtggactccaacgtcaaagggcgaaaaaccgtctatcagggcgatggcccactacgtgaaccatcacccaaatcaagttttttggggtcgaggtgccgtaaagcactaaatcggaaccctaaagggagcccccgatttagagcttgacggggaaagccggcgaacgtggcgagaaaggaagggaagaaagcgaaaggagcgggcgctagggcgctggcaagtgtagcggtcacgctgcgcgtaaccaccacacccgccgcgcttaatgcgccgctacagggcgcgtaaaaggatctaggtgaagatcctttttgataatctcatgaccaaaatcccttaacgtgagttttcgttccactgagcgtcagaccccgtagaaaagatcaaaggatcttcttgagatcctttttttctgcgcgtaatctgctgcttgcaaacaaaaaaaccaccgctaccagcggtggtttgtttgccggatcaagagctaccaactctttttccgaaggtaactggcttcagcagagcgcagataccaaatactgtccttctagtgtagccgtagttaggccaccacttcaagaactctgtagcaccgcctacatacctcgctctgctaatcctgttaccagtggctgctgccagtggcgataagtcgtgtcttaccgggttggactcaagacgatagttaccggataaggcgcagcggtcgggctgaacggggggttcgtgcacacagcccagcttggagcgaacgacctacaccgaactgagatacctacagcgtgagctatgagaaagcgccacgcttcccgaagggagaaaggcggacaggtatccggtaagcggcagggtcggaacaggagagcgcacgagggagcttccagggggaaacgcctggtatctttatagtcctgtcgggtttcgccacctctgacttgagcgtcgatttttgtgatgctcgtcaggggggcggagcctatggaaaaacgccagcaacgcggcctttttacggttcctggccttttgctggccttttgctcacatgttctttcctgcgttatcccctgattctgtggataaccgtattaccgcctttgagtgagctgataccgctcgccgcagccgaacgaccgagcgcagcgagtcagtgagcgaggaagcggaagagcgcctgatgcggtattttctccttacgcatctgtgcggtatttcacaccgcatatggtgcactctcagtacaatctgctctgatgccgcatagttaagccagtatacactccgctatcgctacgtgactgggtcatggctgcgccccgacacccgccaacacccgctgacgcgccctgacgggcttgtctgctcccggcatccgcttacagacaagctgtgaccgtctccgggagctgcatgtgtcagaggttttcaccgtcatcaccgaaacgcgcgaggcagctgcggtaaagctcatcagcgtggtcgtgcagcgattcacagatgtctgcctgttcatccgcgtccagctcgttgagtttctccagaagcgttaatgtctggcttctgataaagcgggccatgttaagggcggttttttcctgtttggtcactgatgcctccgtgtaagggggatttctgttcatgggggtaatgataccgatgaaacgagagaggatgctcacgatacgggttactgatgatgaacatgcccggttactggaacgttgtgagggtaaacaactggcggtatggatgcggcgggaccagagaaaaatcactcagggtcaatgccagcgcttcgttaatacagatgtaggtgttccacagggtagccagcagcatcctgcgatgcagatccggaacataatggtgcagggcgctgacttccgcgtttccagactttacgaaacacggaaaccgaagaccattcatgttgttgctcaggtcgcagacgttttgcagcagcagtcgcttcacgttcgctcgcgtatcggtgattcattctgctaaccagtaaggcaaccccgccagcctagccgggtcctcaacgacaggagcacgatcatgcgcacccgtggccaggacccaacgctgcccgaaatt

SEQ ID NO: 616 - DNA, 543 bp, M13 phage
  GeneIII
agcggctcgagcggtggtggctctgagggtggcggttctgagggtggcggctctgagggaggcggttccggtggtggctctggttccggtgattttgattatgaaaagatggcaaacgctaataagggggctatgaccgaaaatgccgatgaaaacgcgctacagtctgacgctaaaggcaaacttgattctgtcgctactgattacggtgctgctatcgatggtttcattggtgacgtttccggccttgctaatggtaatggtgctactggtgattttgctggctctaattcccaaatggctcaagtcggtgacggtgataattcacctttaatgaataatttccgtcaatatttaccttccctccctcaatcggttgaatgtcgcccttttgtctttggcgctggtaaaccgtatgaattttctattgattgtgacaaaataaacttattccgtggtgtctttgcgtttcttttatatgttgccacctttatgtatgtattttctacgtttgctaacatactgcgtaataaggagtcttaa

SEQ ID NO: 617 - protein, 3 aa, Artificial Sequence
  uPA cleavage substrate AGR
AGR

SEQ ID NO: 618 - DNA, 20 bp, Artificial Sequence
  MTSP sequencing primer
ggtgttttcacgagcacttc

SEQ ID NO: 619 - DNA, 6601 bp, Artificial Sequence
  pCAT0002 vector
gatctcgatcccgcgaaattaatacgactcactataggggaattgtgagcggataacaattcccctctagaaataattttgtttaactttaagaaggagatatacatatgtcgggattaaacgacattttcgaagcgcagaagattgaatggcacgaggcgagcgaaaacttgtactttcagggcgtgcatcatccgccgagctatgtagcgcatctggcttccgactttggcgtgcgtgtgtttcagcaggtcgcccaggcgtcaaaagatcgcaatgtggtgttcagcccgtatggtgttgcgtccgtgttggcgatgcttcaacttactaccggcggtgaaacgcagcaacagattcaggcggcgatgggcttcaagatagatgacaaaggcatggcacccgccctgcgtcatctgtataaagaactgatggggccgtggaacaaagatgagattagcaccaccgatgcgatatttgtgcagcgcgatctgaagctggtccagggattcatgcctcatttcttccgtctgtttcgtagcaccgtgaaacaggtggattttagcgaggtggagcgtgcccgcttcatcataaacgattgggtgaagacccacacgaagggcatgatttcgcacctgcttgggaccggcgctgtggatcaactgacccgtctggtgctggtaaatgcgttgtatttcaacgggcaatggaaaaccccgtttccggattcaagcacccatcgtcgtctttttcataaaagcgatggctctaccgtcagcgtccccatgatggcgcagacgaacaaattcaattacaccgaattcaccacgccggatggccactactatgatattctggagctgccgtaccatggcgataccctgagcatgttcattgcggcaccgtatgagaaagaagtgccgctgtcggctctgaccaacattctgagcgcgcagcttattagccattggaaaggcaatatgacccgcctgccacgtctgctggttctgccgaaatttagcctggagaccgaagtggatctgcgtaaaccgctggagaatctggggatgacggatatgttccggcagtttcaagctgatttcaccagccttagcgaccaggaacctctgcatgtggccctggcgttgcagaaggttaagatcgaagtgaatgaaagcggaaccgtggcgtctagtagcactgctgtgattcgtcgtgcgcgtatggcgcctgaggaaattatcatcgaccgtccgttcctgtttgtggtgcgtcacaatccgaccgggactgtgctgtttatgggccaggtgatggaaccgtaataagcttgcggccgcactcgagcaccaccaccaccaccactgagatccggctgctaacaaagcccgaaaggaagctgagttggctgctgccaccgctgagcaataactagcataaccccttggggcctctaaacgggtcttgaggggttttttgctgaaaggaggaactatatccggattggcgaatgggacgcgccctgtagcggcgcattaagcgcggcgggtgtggtggttacgcgcagcgtgaccgctacacttgccagcgccctagcgcccgctcctttcgctttcttcccttcctttctcgccacgttcgccggctttccccgtcaagctctaaatcgggggctccctttagggttccgatttagtgctttacggcacctcgaccccaaaaaacttgattagggtgatggttcacgtagtgggccatcgccctgatagacggtttttcgccctttgacgttggagtccacgttctttaatagtggactcttgttccaaactggaacaacactcaaccctatctcggtctattcttttgatttataagggattttgccgatttcggcctattggttaaaaaatgagctgatttaacaaaaatttaacgcgaattttaacaaaatattaacgtttacaatttcaggtggcacttttcggggaaatgtgcgcggaacccctatttgtttatttttctaaatacattcaaatatgtatccgctcatgagacaataaccctgataaatgcttcaataatattgaaaaaggaagagtatgagtattcaacatttccgtgtcgcccttattcccttttttgcggcattttgccttcctgtttttgctcacccagaaacgctggtgaaagtaaaagatgctgaagatcagttgggtgcacgagtgggttacatcgaactggatctcaacagcggtaagatccttgagagttttcgccccgaagaacgttttccaatgatgagcacttttaaagttctgctatgtggcgcggtattatcccgtattgacgccgggcaagagcaactcggtcgccgcatacactattctcagaatgacttggttgagtactcaccagtcacagaaaagcatcttacggatggcatgacagtaagagaattatgcagtgctgccataaccatgagtgataacactgcggccaacttacttctgacaacgatcggaggaccgaaggagctaaccgcttttttgcacaacatgggggatcatgtaactcgccttgatcgttgggaaccggagctgaatgaagccataccaaacgacgagcgtgacaccacgatgcctgcagcaatggcaacaacgttgcgcaaactattaactggcgaactacttactctagcttcccggcaacaattaatagactggatggaggcggataaagttgcaggaccacttctgcgctcggcccttccggctggctggtttattgctgataaatctggagccggtgagcgtgggtctcgcggtatcattgcagcactggggccagatggtaagccctcccgtatcgtagttatctacacgacggggagtcaggcaactatggatgaacgaaatagacagatcgctgagataggtgcctcactgattaagcattggtaactgtcagaccaagtttactcatatatactttagattgatttaaaacttcatttttaatttaaaaggatctaggtgaagatcctttttgataatctcatgaccaaaatcccttaacgtgagttttcgttccactgagcgtcagaccccgtagaaaagatcaaaggatcttcttgagatcctttttttctgcgcgtaatctgctgcttgcaaacaaaaaaaccaccgctaccagcggtggtttgtttgccggatcaagagctaccaactctttttccgaaggtaactggcttcagcagagcgcagataccaaatactgtccttctagtgtagccgtagttaggccaccacttcaagaactctgtagcaccgcctacatacctcgctctgctaatcctgttaccagtggctgctgccagtggcgataagtcgtgtcttaccgggttggactcaagacgatagttaccggataaggcgcagcggtcgggctgaacggggggttcgtgcacacagcccagcttggagcgaacgacctacaccgaactgagatacctacagcgtgagctatgagaaagcgccacgcttcccgaagggagaaaggcggacaggtatccggtaagcggcagggtcggaacaggagagcgcacgagggagcttccagggggaaacgcctggtatctttatagtcctgtcgggtttcgccacctctgacttgagcgtcgatttttgtgatgctcgtcaggggggcggagcctatggaaaaacgccagcaacgcggcctttttacggttcctggccttttgctggccttttgctcacatgttctttcctgcgttatcccctgattctgtggataaccgtattaccgcctttgagtgagctgataccgctcgccgcagccgaacgaccgagcgcagcgagtcagtgagcgaggaagcggaagagcgcctgatgcggtattttctccttacgcatctgtgcggtatttcacaccgcatatatggtgcactctcagtacaatctgctctgatgccgcatagttaagccagtatacactccgctatcgctacgtgactgggtcatggctgcgccccgacacccgccaacacccgctgacgcgccctgacgggcttgtctgctcccggcatccgcttacagacaagctgtgaccgtctccgggagctgcatgtgtcagaggttttcaccgtcatcaccgaaacgcgcgaggcagctgcggtaaagctcatcagcgtggtcgtgaagcgattcacagatgtctgcctgttcatccgcgtccagctcgttgagtttctccagaagcgttaatgtctggcttctgataaagcgggccatgttaagggcggttttttcctgtttggtcactgatgcctccgtgtaagggggatttctgttcatgggggtaatgataccgatgaaacgagagaggatgctcacgatacgggttactgatgatgaacatgcccggttactggaacgttgtgagggtaaacaactggcggtatggatgcggcgggaccagagaaaaatcactcagggtcaatgccagcgcttcgttaatacagatgtaggtgttccacagggtagccagcagcatcctgcgatgcagatccggaacataatggtgcagggcgctgacttccgcgtttccagactttacgaaacacggaaaccgaagaccattcatgttgttgctcaggtcgcagacgttttgcagcagcagtcgcttcacgttcgctcgcgtatcggtgattcattctgctaaccagtaaggcaaccccgccagcctagccgggtcctcaacgacaggagcacgatcatgcgcacccgtggggccgccatgccggcgataatggcctgcttctcgccgaaacgtttggtggcgggaccagtgacgaaggcttgagcgagggcgtgcaagattccgaataccgcaagcgacaggccgatcatcgtcgcgctccagcgaaagcggtcctcgccgaaaatgacccagagcgctgccggcacctgtcctacgagttgcatgataaagaagacagtcataagtgcggcgacgatagtcatgccccgcgcccaccggaaggagctgactgggttgaaggctctcaagggcatcggtcgagatcccggtgcctaatgagtgagctaacttacattaattgcgttgcgctcactgcccgctttccagtcgggaaacctgtcgtgccagctgcattaatgaatcggccaacgcgcggggagaggcggtttgcgtattgggcgccagggtggtttttcttttcaccagtgagacgggcaacagctgattgcccttcaccgcctggccctgagagagttgcagcaagcggtccacgctggtttgccccagcaggcgaaaatcctgtttgatggtggttaacggcgggatataacatgagctgtcttcggtatcgtcgtatcccactaccgagatatccgcaccaacgcgcagcccggactcggtaatggcgcgcattgcgcccagcgccatctgatcgttggcaaccagcatcgcagtgggaacgatgccctcattcagcatttgcatggtttgttgaaaaccggacatggcactccagtcgccttcccgttccgctatcggctgaatttgattgcgagtgagatatttatgccagccagccagacgcagacgcgccgagacagaacttaatgggcccgctaacagcgcgatttgctggtgacccaatgcgaccagatgctccacgcccagtcgcgtaccgtcttcatgggagaaaataatactgttgatgggtgtctggtcagagacatcaagaaataacgccggaacattagtgcaggcagcttccacagcaatggcatcctggtcatccagcggatagttaatgatcagcccactgacgcgttgcgcgagaagattgtgcaccgccgctttacaggcttcgacgccgcttcgttctaccatcgacaccaccacgctggcacccagttgatcggcgcgagatttaatcgccgcgacaatttgcgacggcgcgtgcagggccagactggaggtggcaacgccaatcagcaacgactgtttgcccgccagttgttgtgccacgcggttgggaatgtaattcagctccgccatcgccgcttccactttttcccgcgttttcgcagaaacgtggctggcctggttcaccacgcgggaaacggtctgataagagacaccggcatactctgcgacatcgtataacgttactggtttcacattcaccaccctgaattgactctcttccgggcgctatcatgccataccgcgaaaggttttgcgccattcgatggtgtccgggatctcgacgctctcccttatgcgactcctgcattaggaagcagcccagtagtaggttgaggccgttgagcaccgccgccgcaaggaatggtgcatgcaaggagatggcgcccaacagtcccccggccacggggcctgccaccatacccacgccgaaacaagcgctcatgagcccgaagtggcgagcccgatcttccccatcggtgatgtcggcgatataggcgccagcaaccgcacctgtggcgccggtgatgccggccacgatgcgtccggcgtagaggatcga

SEQ ID NO: 620 - protein, 4 aa, Artificial Sequence
  GGGS linker
GGGS

SEQ ID NO: 621 - protein, 405 aa, Homo sapiens
  Mutant PAI-1; OptiPAI-1stab
MSGLNDIFEAQKIEWHEASENLYFQGVHHPPSYVAHLASDFGVRVFQQVAQASKDRNVVFSPYGVASVLAMLQLTTGGETQQQIQAAMGFKIDDKGMAPALRHLYKELMGPWNKDEISTTDAIFVQRDLKLVQGFMPHFFRLFRSTVKQVDFSEVERARFIINDWVKTHTKGMISHLLGTGAVDQLTRLVLVNALYFNGQWKTPFPDSSTHRRLFHKSDGSTVSVPMMAQTNKFNYTEFTTPDGHYYDILELPYHGDTLSMFIAAPYEKEVPLSALTNILSAQLISHWKGNMTRLPRLLVLPKFSLETEVDLRKPLENLGMTDMFRQFQADFTSLSDQEPLHVALALQKVKIEVNESGTVASSSTAVIRRARMAPEEIIIDRPFLFVVRHNPTGTVLFMGQVMEP

SEQ ID NO: 622 - protein, 381 aa, Homo sapiens
  Mutant PAI-1; V1C OptiPAI-1stab
MCVHHPPSYVAHLASDFGVRVFQQVAQASKDRNVVFSPYGVASVLAMLQLTTGGETQQQIQAAMGFKIDDKGMAPALRHLYKELMGPWNKDEISTTDAIFVQRDLKLVQGFMPHFFRLFRSTVKQVDFSEVERARFIINDWVKTHTKGMISHLLGTGAVDQLTRLVLVNALYFNGQWKTPFPDSSTHRRLFHKSDGSTVSVPMMAQTNKFNYTEFTTPDGHYYDILELPYHGDTLSMFIAAPYEKEVPLSALTNILSAQLISHWKGNMTRLPRLLVLPKFSLETEVDLRKPLENLGMTDMFRQFQADFTSLSDQEPLHVALALQKVKIEVNESGTVASSSTAVIRRARMAPEEIIIDRPFLFVVRHNPTGTVLFMGQVMEP

SEQ ID NO: 623 - DNA, 6526 bp, Artificial Sequence
  pCAT0051 vector
gatctcgatcccgcgaaattaatacgactcactataggggaattgtgagcggataacaattcccctctagaaataattttgtttaactttaagaaggagatatacatatgtgccatcatccgccgagctatgtagcgcatctggcttccgactttggcgtgcgtgtgtttcagcaggtcgcccaggcgtcaaaagatcgcaatgtggtgttcagcccgtatggtgttgcgtccgtgttggcgatgcttcaacttactaccggcggtgaaacgcagcaacagattcaggcggcgatgggcttcaagatagatgacaaaggcatggcacccgccctgcgtcatctgtataaagaactgatggggccgtggaacaaagatgagattagcaccaccgatgcgatatttgtgcagcgcgatctgaagctggtccagggattcatgcctcatttcttccgtctgtttcgtagcaccgtgaaacaggtggattttagcgaggtggagcgtgcccgcttcatcataaacgattgggtgaagacccacacgaagggcatgatttcgcacctgcttgggaccggcgctgtggatcaactgacccgtctggtgctggtaaatgcgttgtatttcaacgggcaatggaaaaccccgtttccggattcaagcacccatcgtcgtctttttcataaaagcgatggctctaccgtcagcgtccccatgatggcgcagacgaacaaattcaattacaccgaattcaccacgccggatggccactactatgatattctggagctgccgtaccatggcgataccctgagcatgttcattgcggcaccgtatgagaaagaagtgccgctgtcggctctgaccaacattctgagcgcgcagcttattagccattggaaaggcaatatgacccgcctgccacgtctgctggttctgccgaaatttagcctggagaccgaagtggatctgcgtaaaccgctggagaatctggggatgacggatatgttccggcagtttcaagctgatttcaccagccttagcgaccaggaacctctgcatgtggccctggcgttgcagaaggttaagatcgaagtgaatgaaagcggaaccgtggcgtctagtagcactgctgtgattcgtcgtgcgcgtatggcgcctgaggaaattatcatcgaccgtccgttcctgtttgtggtgcgtcacaatccgaccgggactgtgctgtttatgggccaggtgatggaaccgtaataagcttgcggccgcactcgagcaccaccaccaccaccactgagatccggctgctaacaaagcccgaaaggaagctgagttggctgctgccaccgctgagcaataactagcataaccccttggggcctctaaacgggtcttgaggggttttttgctgaaaggaggaactatatccggattggcgaatgggacgcgccctgtagcggcgcattaagcgcggcgggtgtggtggttacgcgcagcgtgaccgctacacttgccagcgccctagcgcccgctcctttcgctttcttcccttcctttctcgccacgttcgccggctttccccgtcaagctctaaatcgggggctccctttagggttccgatttagtgctttacggcacctcgaccccaaaaaacttgattagggtgatggttcacgtagtgggccatcgccctgatagacggtttttcgccctttgacgttggagtccacgttctttaatagtggactcttgttccaaactggaacaacactcaaccctatctcggtctattcttttgatttataagggattttgccgatttcggcctattggttaaaaaatgagctgatttaacaaaaatttaacgcgaattttaacaaaatattaacgtttacaatttcaggtggcacttttcggggaaatgtgcgcggaacccctatttgtttatttttctaaatacattcaaatatgtatccgctcatgagacaataaccctgataaatgcttcaataatattgaaaaaggaagagtatgagtattcaacatttccgtgtcgcccttattcccttttttgcggcattttgccttcctgtttttgctcacccagaaacgctggtgaaagtaaaagatgctgaagatcagttgggtgcacgagtgggttacatcgaactggatctcaacagcggtaagatccttgagagttttcgccccgaagaacgttttccaatgatgagcacttttaaagttctgctatgtggcgcggtattatcccgtattgacgccgggcaagagcaactcggtcgccgcatacactattctcagaatgacttggttgagtactcaccagtcacagaaaagcatcttacggatggcatgacagtaagagaattatgcagtgctgccataaccatgagtgataacactgcggccaacttacttctgacaacgatcggaggaccgaaggagctaaccgcttttttgcacaacatgggggatcatgtaactcgccttgatcgttgggaaccggagctgaatgaagccataccaaacgacgagcgtgacaccacgatgcctgcagcaatggcaacaacgttgcgcaaactattaactggcgaactacttactctagcttcccggcaacaattaatagactggatggaggcggataaagttgcaggaccacttctgcgctcggcccttccggctggctggtttattgctgataaatctggagccggtgagcgtgggtctcgcggtatcattgcagcactggggccagatggtaagccctcccgtatcgtagttatctacacgacggggagtcaggcaactatggatgaacgaaatagacagatcgctgagataggtgcctcactgattaagcattggtaactgtcagaccaagtttactcatatatactttagattgatttaaaacttcatttttaatttaaaaggatctaggtgaagatcctttttgataatctcatgaccaaaatcccttaacgtgagttttcgttccactgagcgtcagaccccgtagaaaagatcaaaggatcttcttgagatcctttttttctgcgcgtaatctgctgcttgcaaacaaaaaaaccaccgctaccagcggtggtttgtttgccggatcaagagctaccaactctttttccgaaggtaactggcttcagcagagcgcagataccaaatactgtccttctagtgtagccgtagttaggccaccacttcaagaactctgtagcaccgcctacatacctcgctctgctaatcctgttaccagtggctgctgccagtggcgataagtcgtgtcttaccgggttggactcaagacgatagttaccggataaggcgcagcggtcgggctgaacggggggttcgtgcacacagcccagcttggagcgaacgacctacaccgaactgagatacctacagcgtgagctatgagaaagcgccacgcttcccgaagggagaaaggcggacaggtatccggtaagcggcagggtcggaacaggagagcgcacgagggagcttccagggggaaacgcctggtatctttatagtcctgtcgggtttcgccacctctgacttgagcgtcgatttttgtgatgctcgtcaggggggcggagcctatggaaaaacgccagcaacgcggcctttttacggttcctggccttttgctggccttttgctcacatgttctttcctgcgttatcccctgattctgtggataaccgtattaccgcctttgagtgagctgataccgctcgccgcagccgaacgaccgagcgcagcgagtcagtgagcgaggaagcggaagagcgcctgatgcggtattttctccttacgcatctgtgcggtatttcacaccgcatatatggtgcactctcagtacaatctgctctgatgccgcatagttaagccagtatacactccgctatcgctacgtgactgggtcatggctgcgccccgacacccgccaacacccgctgacgcgccctgacgggcttgtctgctcccggcatccgcttacagacaagctgtgaccgtctccgggagctgcatgtgtcagaggttttcaccgtcatcaccgaaacgcgcgaggcagctgcggtaaagctcatcagcgtggtcgtgaagcgattcacagatgtctgcctgttcatccgcgtccagctcgttgagtttctccagaagcgttaatgtctggcttctgataaagcgggccatgttaagggcggttttttcctgtttggtcactgatgcctccgtgtaagggggatttctgttcatgggggtaatgataccgatgaaacgagagaggatgctcacgatacgggttactgatgatgaacatgcccggttactggaacgttgtgagggtaaacaactggcggtatggatgcggcgggaccagagaaaaatcactcagggtcaatgccagcgcttcgttaatacagatgtaggtgttccacagggtagccagcagcatcctgcgatgcagatccggaacataatggtgcagggcgctgacttccgcgtttccagactttacgaaacacggaaaccgaagaccattcatgttgttgctcaggtcgcagacgttttgcagcagcagtcgcttcacgttcgctcgcgtatcggtgattcattctgctaaccagtaaggcaaccccgccagcctagccgggtcctcaacgacaggagcacgatcatgcgcacccgtggggccgccatgccggcgataatggcctgcttctcgccgaaacgtttggtggcgggaccagtgacgaaggcttgagcgagggcgtgcaagattccgaataccgcaagcgacaggccgatcatcgtcgcgctccagcgaaagcggtcctcgccgaaaatgacccagagcgctgccggcacctgtcctacgagttgcatgataaagaagacagtcataagtgcggcgacgatagtcatgccccgcgcccaccggaaggagctgactgggttgaaggctctcaagggcatcggtcgagatcccggtgcctaatgagtgagctaacttacattaattgcgttgcgctcactgcccgctttccagtcgggaaacctgtcgtgccagctgcattaatgaatcggccaacgcgcggggagaggcggtttgcgtattgggcgccagggtggtttttcttttcaccagtgagacgggcaacagctgattgcccttcaccgcctggccctgagagagttgcagcaagcggtccacgctggtttgccccagcaggcgaaaatcctgtttgatggtggttaacggcgggatataacatgagctgtcttcggtatcgtcgtatcccactaccgagatatccgcaccaacgcgcagcccggactcggtaatggcgcgcattgcgcccagcgccatctgatcgttggcaaccagcatcgcagtgggaacgatgccctcattcagcatttgcatggtttgttgaaaaccggacatggcactccagtcgccttcccgttccgctatcggctgaatttgattgcgagtgagatatttatgccagccagccagacgcagacgcgccgagacagaacttaatgggcccgctaacagcgcgatttgctggtgacccaatgcgaccagatgctccacgcccagtcgcgtaccgtcttcatgggagaaaataatactgttgatgggtgtctggtcagagacatcaagaaataacgccggaacattagtgcaggcagcttccacagcaatggcatcctggtcatccagcggatagttaatgatcagcccactgacgcgttgcgcgagaagattgtgcaccgccgctttacaggcttcgacgccgcttcgttctaccatcgacaccaccacgctggcacccagttgatcggcgcgagatttaatcgccgcgacaatttgcgacggcgcgtgcagggccagactggaggtggcaacgccaatcagcaacgactgtttgcccgccagttgttgtgccacgcggttgggaatgtaattcagctccgccatcgccgcttccactttttcccgcgttttcgcagaaacgtggctggcctggttcaccacgcgggaaacggtctgataagagacaccggcatactctgcgacatcgtataacgttactggtttcacattcaccaccctgaattgactctcttccgggcgctatcatgccataccgcgaaaggttttgcgccattcgatggtgtccgggatctcgacgctctcccttatgcgactcctgcattaggaagcagcccagtagtaggttgaggccgttgagcaccgccgccgcaaggaatggtgcatgcaaggagatggcgcccaacagtcccccggccacggggcctgccaccatacccacgccgaaacaagcgctcatgagcccgaagtggcgagcccgatcttccccatcggtgatgtcggcgatataggcgccagcaaccgcacctgtggcgccggtgatgccggccacgatgcgtccggcgtagaggatcga

SEQ ID NO: 624 - DNA, 4202 bp, Artificial Sequence
  pQE30 vector
ctcgagaaatcataaaaaatttatttgctttgtgagcggataacaattataatagattcaattgtgagcggataacaatttcacacagaattcattaaagaggagaaattaactatgagaggatcgcatcaccatcaccatcacggatccgatgagaaggactgcgactgtgggctgcggtcattcacgagacaggctcgtgttgttgggggcacggatgcggatgagggcgagtggccctggcaggtaagcctgcatgctctgggccagggccacatctgcggtgcttccctcatctctcccaactggctggtctctgccgcacactgctacatcgatgacagaggattcaggtactcagaccccacgcagtggacggccttcctgggcttgcacgaccagagccagcgcagcgcccctggggtgcaggagcgcaggctcaagcgcatcatctcccaccccttcttcaatgacttcaccttcgactatgacatcgcgctgctggagctggagaaaccggcagagtacagctccatggtgcggcccatctgcctgccggacgcctcccatgtcttccctgccggcaaggccatctgggtcacgggctggggacacacccagtatggaggcactggcgcgctgatcctgcaaaagggtgagatccgcgtcatcaaccagaccacctgcgagaacctcctgccgcagcagatcacgccgcgcatgatgtgcgtgggcttcctcagcggcggcgtggactcctgccagggtgattccgggggacccctgtccagcgtggaggcggatgggcggatcttccaggccggtgtggtgagctggggagacggctgcgctcagaggaacaagccaggcgtgtacacaaggctccctctgtttcgggactggatcaaagagaacactggggtatagaagcttaattagctgagcttggactcctgttgatagatccagtaatgacctcagaactccatctggatttgttcagaacgctcggttgccgccgggcgttttttattggtgagaatccaagctagcttggcgagattttcaggagctaaggaagctaaaatggagaaaaaaatcactggatataccaccgttgatatatcccaatggcatcgtaaagaacattttgaggcatttcagtcagttgctcaatgtacctataaccagaccgttcagctggatattacggcctttttaaagaccgtaaagaaaaataagcacaagttttatccggcctttattcacattcttgcccgcctgatgaatgctcatccggaatttcgtatggcaatgaaagacggtgagctggtgatatgggatagtgttcacccttgttacaccgttttccatgagcaaactgaaacgttttcatcgctctggagtgaataccacgacgatttccggcagtttctacacatatattcgcaagatgtggcgtgttacggtgaaaacctggcctatttccctaaagggtttattgagaatatgtttttcgtctcagccaatccctgggtgagtttcaccagttttgatttaaacgtggccaatatggacaacttcttcgcccccgttttcaccatgggcaaatattatacgcaaggcgacaaggtgctgatgccgctggcgattcaggttcatcatgccgtttgtgatggcttccatgtcggcagaatgcttaatgaattacaacagtactgcgatgagtggcagggcggggcgtaatttttttaaggcagttattggtgcccttaaacgcctggggtaatgactctctagcttgaggcatcaaataaaacgaaaggctcagtcgaaagactgggcctttcgttttatctgttgtttgtcggtgaacgctctcctgagtaggacaaatccgccctctagagctgcctcgcgcgtttcggtgatgacggtgaaaacctctgacacatgcagctcccggagacggtcacagcttgtctgtaagcggatgccgggagcagacaagcccgtcagggcgcgtcagcgggtgttggcgggtgtcggggcgcagccatgacccagtcacgtagcgatagcggagtgtatactggcttaactatgcggcatcagagcagattgtactgagagtgcaccatatgcggtgtgaaataccgcacagatgcgtaaggagaaaataccgcatcaggcgctcttccgcttcctcgctcactgactcgctgcgctcggtcgttcggctgcggcgagcggtatcagctcactcaaaggcggtaatacggttatccacagaatcaggggataacgcaggaaagaacatgtgagcaaaaggccagcaaaaggccaggaaccgtaaaaaggccgcgttgctggcgtttttccataggctccgcccccctgacgagcatcacaaaaatcgacgctcaagtcagaggtggcgaaacccgacaggactataaagataccaggcgtttccccctggaagctccctcgtgcgctctcctgttccgaccctgccgcttaccggatacctgtccgcctttctcccttcgggaagcgtggcgctttctcatagctcacgctgtaggtatctcagttcggtgtaggtcgttcgctccaagctgggctgtgtgcacgaaccccccgttcagcccgaccgctgcgccttatccggtaactatcgtcttgagtccaacccggtaagacacgacttatcgccactggcagcagccactggtaacaggattagcagagcgaggtatgtaggcggtgctacagagttcttgaagtggtggcctaactacggctacactagaaggacagtatttggtatctgcgctctgctgaagccagttaccttcggaaaaagagttggtagctcttgatccggcaaacaaaccaccgctggtagcggtggtttttttgtttgcaagcagcagattacgcgcagaaaaaaaggatctcaagaagatcctttgatcttttctacggggtctgacgctcagtggaacgaaaactcacgttaagggattttggtcatgagattatcaaaaaggatcttcacctagatccttttaaattaaaaatgaagttttaaatcaatctaaagtatatatgagtaaacttggtctgacagttaccaatgcttaatcagtgaggcacctatctcagcgatctgtctatttcgttcatccatagttgcctgactccccgtcgtgtagataactacgatacgggagggcttaccatctggccccagtgctgcaatgataccgcgagacccacgctcaccggctccagatttatcagcaataaaccagccagccggaagggccgagcgcagaagtggtcctgcaactttatccgcctccatccagtctattaattgttgccgggaagctagagtaagtagttcgccagttaatagtttgcgcaacgttgttgccattgctacaggcatcgtggtgtcacgctcgtcgtttggtatggcttcattcagctccggttcccaacgatcaaggcgagttacatgatcccccatgttgtgcaaaaaagcggttagctccttcggtcctccgatcgttgtcagaagtaagttggccgcagtgttatcactcatggttatggcagcactgcataattctcttactgtcatgccatccgtaagatgcttttctgtgactggtgagtactcaaccaagtcattctgagaatagtgtatgcggcgaccgagttgctcttgcccggcgtcaatacgggataataccgcgccacatagcagaactttaaaagtgctcatcattggaaaacgttcttcggggcgaaaactctcaaggatcttaccgctgttgagatccagttcgatgtaacccactcgtgcacccaactgatcttcagcatcttttactttcaccagcgtttctgggtgagcaaaaacaggaaggcaaaatgccgcaaaaaagggaataagggcgacacggaaatgttgaatactcatactcttcctttttcaatattattgaagcatttatcagggttattgtctcatgagcggatacatatttgaatgtatttagaaaaataaacaaataggggttccgcgcacatttccccgaaaagtgccacctgacgtctaagaaaccattattatcatgacattaacctataaaaataggcgtatcacgaggccctttcgtcttcac

SEQ ID NO: 625 - DNA, 4822 bp, Artificial Sequence
  pPAI-his vector
  misc_feature (1)...(4822): n = A,T,C or G
gatctcgatcccgcgaaattaatacgactcactatagggagaccacaacggtttccctctagaaataattttgtttaactttaagaaggagatatacatatgcaccatcaccatcaccatgctagcgagaatctttattttcagggcgtgcaccatcccccatcctacgtggcccacctggcctcagacttcggggtgagggtgtttcagcaggtggcgcaggcctccaaggaccgcaacgtggttttctcaccctatggggtggcctcggtgttggccatgctccagctgacaacaggaggagaaacccagcagcagattcaagcagctatgggattcaagattgatgacaagggcatggcccccgccctccggcatctgtacaaggagctcatggggccatggaacaaggatgagatcagcaccacagacgcgatcttcgtccagcgggatctgaagctggtccagggcttcatgccccacttcttcaggctgttccggagcacggtcaagcaagtggacttttcagaggtggagagagccagattcatcatcaatgactgggtgaagacacacacaaaaggtatgatcagcaacttgcttgggaaaggagccgtggaccagctgacacggctggtgctggtgaatgccctctacttcaacggccagtggaagactcccttccccgactccagcacccaccgccgcctcttccacaaatcagacggcagcactgtctctgtgcccatgatggctcagaccaacaagttcaactatactgagttcaccacgcccgatggccattactacgacatcctggaactgccctaccacggggacaccctcagcatgttcattgctgccccttatgaaaaagaggtgcctctctctgccctcaccaacattctgagtgcccagctcatcagccactggaaaggcaacatgaccaggctgccccgcctcctggttctgcccaagttctccctggagactgaagtcgacctcaggaagcccctagagaacctgggaatgaccgacatgttcagacagtttcaggctgacttcacgagtctttcagaccaagagcctctccacgtcgcgcaggcgctgcagaaagtgaagatcgaggtgaacgagagtggcacggtggcctcctcatccacagctgtcatannnnnnnnnnnnnnnnnncccgaggagatcatcatggacagacccttcctctttgtggtccggcacaaccccacaggaacagtccttttcatgggccaagtgatggaaccctgaaagcttccgggatccggctgctaacaaagcccgaaaggaagctgagttggctgctgccaccgctgagcaataactagcataaccccttggggcctctaaacgggtcttgaggggttttttgctgaaaggaggaactatatccggatcgacgcgaggctggatggccttccccattatgattcttctcgcttccggcggcatcgggatgcccgcgttgcaggccatgctgtccaggcaggtagatgacgaccatcagggacagcttcaaggatcgctcgcggctcttaccagcctaacttcgatcattggaccgctgatcgtcacggcgatttatgccgcctcggcgagcacatggaacgggttggcatggattgtaggcgccgccctataccttgtctgcctccccgcgttgcgtcgcggtgcatggagccgggccacctcgacctgaatggaagccggcggcacctcgctaacggattcaccactccaagaattggagccaatcaattcttgcggagaactgtgaatgcgcaaaccaacccttggcagaacatatccatcgcgtccgccatctccagcagccgcacgcggcgcatctcgggcagcgttgggtcctggccacgggtgcgcatgatcgtgctcctgtcgttgaggacccggctaggctggcggggttgccttactggttagcagaatgaatcaccgatacgcgagcgaacgtgaagcgactgctgctgcaaaacgtctgcgacctgagcaacaacatgaatggtcttcggtttccgtgtttcgtaaagtctggaaacgcggaagtcagcgccctgcaccattatgttccggatctgcatcgcaggatgctgctggctaccctgtggaacacctacatctgtattaacgaagcgctggcattgaccctgagtgatttttctctggtcccgccgcatccataccgccagttgtttaccctcacaacgttccagtaaccgggcatgttcatcatcagtaacccgtatcgtgagcatcctctctcgtttcatcggtatcattacccccatgaacagaaatcccccttacacggaggcatcagtgaccaaacaggaaaaaaccgcccttaacatggcccgctttatcagaagccagacattaacgcttctggagaaactcaacgagctggacgcggatgaacaggcagacatctgtgaatcgcttcacgaccacgctgatgagctttaccgcagctgcctcgcgcgtttcggtgatgacggtgaaaacctctgacacatgcagctcccggagacggtcacagcttgtctgtaagcggatgccgggagcagacaagcccgtcagggcgcgtcagcgggtgttggcgggtgtcggggcgcagccatgacccagtcacgtagcgatagcggagtgtatactggcttaactatgcggcatcagagcagattgtactgagagtgcaccatatgcggtgtgaaataccgcacagatgcgtaaggagaaaataccgcatcaggcgctcttccgcttcctcgctcactgactcgctgcgctcggtcgttcggctgcggcgagcggtatcagctcactcaaaggcggtaatacggttatccacagaatcaggggataacgcaggaaagaacatgtgagcaaaaggccagcaaaaggccaggaaccgtaaaaaggccgcgttgctggcgtttttccataggctccgcccccctgacgagcatcacaaaaatcgacgctcaagtcagaggtggcgaaacccgacaggactataaagataccaggcgtttccccctggaagctccctcgtgcgctctcctgttccgaccctgccgcttaccggatacctgtccgcctttctcccttcgggaagcgtggcgctttctcatagctcacgctgtaggtatctcagttcggtgtaggtcgttcgctccaagctgggctgtgtgcacgaaccccccgttcagcccgaccgctgcgccttatccggtaactatcgtcttgagtccaacccggtaagacacgacttatcgccactggcagcagccactggtaacaggattagcagagcgaggtatgtaggcggtgctacagagttcttgaagtggtggcctaactacggctacactagaaggacagtatttggtatctgcgctctgctgaagccagttaccttcggaaaaagagttggtagctcttgatccggcaaacaaaccaccgctggtagcggtggtttttttgtttgcaagcagcagattacgcgcagaaaaaaaggatctcaagaagatcctttgatcttttctacggggtctgacgctcagtggaacgaaaactcacgttaagggattttggtcatgagattatcaaaaaggatcttcacctagatccttttaaattaaaaatgaagttttaaatcaatctaaagtatatatgagtaaacttggtctgacagttaccaatgcttaatcagtgaggcacctatctcagcgatctgtctatttcgttcatccatagttgcctgactccccgtcgtgtagataactacgatacgggagggcttaccatctggccccagtgctgcaatgataccgcgagacccacgctcaccggctccagatttatcagcaataaaccagccagccggaagggccgagcgcagaagtggtcctgcaactttatccgcctccatccagtctattaattgttgccgggaagctagagtaagtagttcgccagttaatagtttgcgcaacgttgttgccattgctgcaggcatcgtggtgtcacgctcgtcgtttggtatggcttcattcagctccggttcccaacgatcaaggcgagttacatgatcccccatgttgtgcaaaaaagcggttagctccttcggtcctccgatcgttgtcagaagtaagttggccgcagtgttatcactcatggttatggcagcactgcataattctcttactgtcatgccatccgtaagatgcttttctgtgactggtgagtactcaaccaagtcattctgagaatagtgtatgcggcgaccgagttgctcttgcccggcgtcaacacgggataataccgcgccacatagcagaactttaaaagtgctcatcattggaaaacgttcttcggggcgaaaactctcaaggatcttaccgctgttgagatccagttcgatgtaacccactcgtgcacccaactgatcttcagcatcttttactttcaccagcgtttctgggtgagcaaaaacaggaaggcaaaatgccgcaaaaaagggaataagggcgacacggaaatgttgaatactcatactcttcctttttcaatattattgaagcatttatcagggttattgtctcatgagcggatacatatttgaatgtatttagaaaaataaacaaataggggttccgcgcacatttccccgaaaagtgccacctgacgtctaagaaaccattattatcatgacattaacctataaaaataggcgtatcacgaggccctttcgtcttcaagaatt

SEQ ID NO: 626 - DNA, 42 bp, Artificial Sequence
  ATIII cDNA forward primer
gtcactgactgacgtggatcccacgggagccctgtggacatc

SEQ ID NO: 627 - protein, 9 aa, Artificial Sequence
  ATIII cDNA forward primer - encoded protein
GSHGSPVDI

SEQ ID NO: 628 - DNA, 60 bp, Artificial Sequence
  ATIII cDNA reverse primer
gtagccaacccttgtgttaagggaggcggaagccatcaccaccatcaccactaagaattc

SEQ ID NO: 629 - protein, 17 aa, Artificial Sequence
  ATIII cDNA reverse primer - encoded protein
VANPCVKGGGSHHHHHH

SEQ ID NO: 630 - DNA, 60 bp, Artificial Sequence
  Wild type AT3 primer
gctgcaagtaccgctgttgtgattgctggccgttcgctaaaccccaacagggtgactttc

SEQ ID NO: 631 - protein, 20 aa, Artificial Sequence
  Wild type AT3 primer - encoded protein
AASTAVVIAGRSLNPNRVTF

SEQ ID NO: 632 - DNA, 60 bp, Artificial Sequence
  Complement C2 Target Sequence primer
gctgcaagtaccgctgttgtgtcgttaggccgtaaaattaaccccaacagggtgactttc

SEQ ID NO: 633 - protein, 20 aa, Artificial Sequence
  Complement C2 Target Sequence primer - encoded protein
AASTAVVSLGRKINPNRVTF

SEQ ID NO: 634 - DNA, 60 bp, Artificial Sequence
  VEGFR2 Target Sequence primer
gctgcaagtaccgctgttgtgcgccgtgtgcgcaaagaaaaccccaacagggtgactttc

SEQ ID NO: 635 - protein, 20 aa, Artificial Sequence
  VEGFR2 Target Sequence primer - encoded primer
AASTAVVRRVRKENPNRVTF

SEQ ID NO: 636 - DNA, 68 bp, Escherichia coli
  STII leader
tgaaaaagaatatcgcatttcttcttgcatctatgttcgttttttctattgctacaaacgcgtatgca
